(19) United States
(12) Patent Application Publication
(10) Pub. No.: US 2003/0165839 A1
(43) Pub. Date: Sep. 4, 2003

(54) Cancer gene determination and therapeutic screening using signature gene sets

(76) Inventors: Paul E. Young, Gaithersburg, MD (US); Daniel R. Soppet, Centreville, VA (US); Gregory Endress, Florence, MA (US); Meena Augustus, Burtonsville, MD (US); Reinhard Ebner, Gaithersburg, MD (US); Kenneth C. Carter, North Potomac, MD (US)

Correspondence Address: CARELLA, BYRNE, BAIN, GILFILLAN,, CECCHI, STEWART & OLSTEIN, 6 Becker Farm Road, Roseland, NJ, 07068, US

(21) Appl. No.: 09/873,367

(22) Filed: Jun. 5, 2001

Related U.S. Application Data
(60) Provisional application No. 60/209,473, filed on Jun. 5, 2000.
(60) Provisional application No. 60/209,531, filed on Jun. 5, 2000.
(60) Provisional application No. 60/236,842, filed on Sep. 29, 2000.
(60) Provisional application No. 60/236,891, filed on Sep. 29, 2000.
(60) Provisional application No. 60/244,867, filed on Nov. 1, 2000.
(60) Provisional application No. 60/245,084, filed on Nov. 1, 2000.

(51) Int. Cl. C12Q 1/68

(52) U.S. Cl. 435/6

(57) ABSTRACT

Processes for assaying potential antitumor agents based on their modulation of the expression of specified genes, or sets, of suspected cancer cell genes are disclosed, along with methods for diagnosing cancerous, or potentially cancerous, conditions as a result of the expression, or patterns of expression, of such genes, or sets of genes. Also disclosed are methods for determining functionally related genes, or gene sets, as well as methods for treating cancer based on targeting expression products of such genes, or gene sets, and determining genes involved in the cancerous process.

[0001] This application claims priority of U.S. Provisional Application No. 60/209,473, filed Jun. 5, 2000; No. 60/209,531, filed Jun. 5, 2000; No. 60/236,842, filed Sep. 29, 2000; No. 60/236,891, filed Sep. 29, 2000; No. 60/244,867, filed Nov. 1, 2000; and No. 60/245,084, filed Nov. 1, 2000, the disclosures of which are hereby incorporated by reference in their entirety.

### FIELD OF THE INVENTION

[0002] The present invention relates to methods of assaying potential anti-tumor agents based on their modulation of the expression of specified sets of genes and methods for diagnosing cancerous, or potentially cancerous, conditions as a result of the patterns of expression of such gene sets.

### BACKGROUND OF THE INVENTION

[0003] Screening assays for novel drugs are based on the response of model cell based systems in vitro to treatment with specific compounds. Various measures of cellular response have been utilized, including the release of cytokines, alterations in cell surface markers, activation of specific enzymes, as well as alterations in ion flux and/or pH. Some such screens rely on specific genes, such as oncogenes (or gene mutations).

### BRIEF SUMMARY OF THE INVENTION

[0004] In accordance with the present invention, there is provided characteristic sets of gene sequences whose expression, or non-expression, or change in expression, either an increase or decrease thereof, are indicative of the cancerous or non-cancerous status of a given cell. More particularly, such genes whose expression is changed in cancerous, as compared to non-cancerous cells, from a specific tissue (in particular, any of those disclosed herein) are genes that include one of the nucleotide sequences of SEQ ID NO: 1-1067, or sequences that are substantially identical to said sequences.

[0005] Such a change in expression may be an increase or a decrease in expression or activity of the gene or gene sequences disclosed herein.

[0006] It is another object of the present invention to provide methods of using such characteristic, or signature, gene sets as a basis for assaying the potential ability of selected chemical agents to modulate upward or downward the expression of said characteristic, or signature, gene sets.

[0007] It is a further object of the present invention to provide methods of detecting the expression, or non-expression, or amount of expression, of said characteristic, or signature, gene sets, or portions thereof, as a means of determining the cancerous, or non-cancerous, status (or potential cancerous status) of selected cells as grown in culture or as maintained in situ.

[0008] It is a still further object of the present invention to provide methods for treating cancerous conditions utilizing selected chemical agents as determined from their ability to modulate (i.e., increase or decrease) the selected characteristic, or signature, gene sets as disclosed herein, where said genes include, or comprise, one of the sequences of SEQ ID NO: 1-1067, or sequences substantially identical to said sequences.

[0009] In another aspect, the present invention relates to a process for determining a cancer initiating, facilitating or suppressing gene comprising the steps of contacting a cancerous cell with a cancer modulating agent and determining a change in expression of a gene selected from the group consisting of the gene sequences of SEQ ID NO: 1-1067 and thereby identifying said gene as being a cancer initiating or facilitating gene. Said genes may, for example, be oncogenes, cancer facilitating or promoting genes, or cancer suppressor genes. Said agents may increase or decrease gene expression.

[0010] The present invention also relates to a process for treating cancer comprising contacting a cancerous cell with an agent having activity against an expression product encoded by a gene sequence selected from the group consisting of SEQ ID NO: 1-1067, which process may be conducted either ex vivo or in vivo. Such agents may comprise an antibody or other molecule or portion that is specific for said expression product.

[0011] In another aspect, the present invention further relates to process for determining a cancer initiating, facilitating or suppressing gene in a cancer cell comprising determining a change in expression of a gene sequence selected from the group consisting of the sequences of SEQ ID NO: 1-1067. Such change in expression is especially a change to a difference in copy number and said difference, either an increase or decrease thereof, and wherein said change is monitored or otherwise determined as a change in messenger RNA formation. Such change can be readily used to diagnose a cancerous condition, either in vivo or ex vivo.

[0012] The present invention still further relates to a process for treating cancer comprising inserting into a cancerous cell a gene construct comprising an anti-cancer gene operably linked to a promoter or enhancer element such that expression of said anti-cancer gene causes suppression of said cancer and wherein said promoter or enhancer element is a promoter or enhancer element modulating a gene sequence selected from the group consisting of the sequences of SEQ ID NO: 1-1067, wherein said gene may be a cancer suppressor gene, or where said gene encodes a polypeptide having anticancer activity, such as one with apoptotic activity.

[0013] In an additional aspect, the present invention relates to a process for determining functionally related genes comprising contacting one or more gene sequences selected from the group consisting of the sequences of SEQ ID NO: 1-1067 with an agent that modulates expression of more than one gene in such group and thereby determining a subset of genes of said group. Said functionally related genes include genes modulating the same metabolic pathway or encoding functionally related polypeptides or where said expression is modulated by the same transcription activator or enhancer sequence.

[0014] The present invention also relates to a method for producing a product comprising identifying an agent according to the process of claim 1 wherein said product is the data collected with respect to said agent as a result of said process and wherein said data is sufficient to convey the chemical structure and/or properties of said agent.

### DETAILED SUMMARY OF THE INVENTION

[0015] The present invention relates to methods of assaying potential antitumor agents based on their modulation of the expression of specified sets of genes and methods for diagnosing cancerous, or potentially cancerous, conditions as a result of the patterns of expression of such gene sets and for determining cancer-inducing or regulating genes, and gene sets, based on common expression or regulation of such genes, or gene sets.

[0016] In accordance with the present invention, model cellular systems using cell lines, primary cells, or tissue samples are maintained in growth medium and may be treated with compounds that may be at a single concentration or at a range of concentrations. At specific times after treatment, cellular RNAs are isolated from the treated cells, primary cells or tumors, which RNAs are indicative of expression of selected genes. The cellular RNA is then divided and subjected to analysis that detects the presence and/or quantity of specific RNA transcripts, which transcripts may then be amplified for detection purposes using standard methodologies, such as, for example, reverse transcriptase polymerase chain reaction (RT-PCR), etc. The presence or absence, or levels, of specific RNA transcripts are determined from these measurements and a metric derived for the type and degree of response of the sample to the treated compound compared to control samples.

[0017] Also in accordance with the present invention, there are disclosed herein characteristic, or signature, sets of genes and gene sequences whose expression is, or can be, as a result of the methods of the present invention, linked to, or used to characterize, the cancerous, or non-cancerous, status of the cells, or tissues, to be tested. Thus, the methods of the present invention identify novel anti-neoplastic agents based on their alteration of expression of small sets of characteristic, or indicator, or signature genes in specific model systems. The methods of the invention may therefore be used with a variety of cell lines or with primary samples from tumors maintained in vitro under suitable culture conditions for varying periods of time, or in situ in suitable animal models.

[0018] More particularly, certain genes have been identified that are expressed at levels in cancer cells that are different than the expression levels in non-cancer cells. In one instance, the identified genes are expressed at higher levels in cancer cells than in normal cells. In another instance, the identified genes are expressed at lower levels in cancer cells as compared to normal cells.

[0019] In accordance with the foregoing, the present invention relates to process for screening a plurality of chemical compounds for anti-neoplastic activity comprising:

[0020] (a) contacting a compound with a cell containing a polynucleotide comprising a nucleotide sequence selected from the group consisting of SEQ ID NO: 1-1067, or a sequence at least 95% identical thereto, under conditions wherein said polynucleotide is being expressed, and

[0021] (b) determining a change in expression of at least one of said polynucleotides,

[0022] wherein a change in expression is indicative of anti-neoplastic activity.

[0023] In particular embodiments, such change in expression may be an increase or a decrease in expression or activity.

[0024] More particularly, the present invention relates to a process for screening for an anti-neoplastic agent comprising the steps of:

[0025] (a) exposing a known cancerous cell to a chemical agent to be tested for antineoplastic activity;

[0026] (b) allowing said chemical agent to modulate the activity of one or more genes present in said cell wherein said genes include or comprise one of the sequences selected from the group consisting of the sequences of SEQ ID NO: 1-1067, sequences substantially identical to said sequences, or the complements of any of the foregoing;

[0027] (c) determining the expression of one or more genes of step (b);

[0028] (d) comparing the expression of said genes in the presence or absence of exposure to said chemical agent;

[0029] wherein a difference in expression is indicative of the ability of anti-neoplastic activity.

[0030] In specific embodiments of the present invention, said chemical agent to be tested modulates the expression of more than one said gene, especially where it modulates at least two said genes, more especially where at least 3, or at least 5 of said genes, or even 10 or more of said genes in said signature set, are modulated. In a preferred embodiment, all of said genes are modulated.

[0031] In one embodiment of the present invention, said gene modulation is downward modulation, so that, as a result of exposure to the chemical agent to be tested, one or more genes of the cancerous cell will be expressed at a lower level (or not expressed at all) when exposed to the agent as compared to the expression when not exposed to the agent.

[0032] In a preferred embodiment a selected set of said genes are expressed in the reference cell but not expressed in the cell to be tested as a result of the exposure of the cell to be tested to the chemical agent. Thus, where said chemical agent causes the gene, or genes, of the tested cell to be expressed at a lower level than the same genes of the reference, this is indicative of downward modulation and indicates that the chemical agent to be tested has anti-neoplastic activity.

[0033] In a separate embodiment, exposure of said cells to be tested to the chemical agent, especially one suspected of having anti-neoplastic activity, may result in upward modulation of said genes of the cell to be tested. Such upward modulation is interpreted as meaning that said genes are expressed where previously not expressed, or else are expressed in greater quantities when exposed to the agent as compared to non-exposure to the agent. Such upward modulation may be taken as indicative of anti-neoplastic activity by the tested chemical agent(s) of the gene, or genes, so modulated results in lower neoplastic activity on the part of such cells, such as where increased expression of the gene, or genes, results in decreased growth and/or increased differentiation of said cells away from the cancerous state.

[0034] The genes useful in the assay processes include, respectively, as a part thereof at least one of the sequences selected from the group consisting of the sequences of SEQ ID NO: 1-1067, or sequences substantially identical thereto. Such sequences also include sequences complementary to any of the sequences disclosed herein.

[0035] Genes including sequences at least 90% identical to a sequence selected from SEQ ID NO: 1-1067, preferably at least about 95% identical to such a sequence, more preferably at least about 98% identical to such sequence and most preferably 100% identical to such a sequence are specifically contemplated by all of the processes of the present invention. In addition, sequences encoding the same proteins as any of these sequences, regardless of the percent identity of such sequences, are also specifically contemplated by any of the methods of the present invention that rely on any or all of said sequences, regardless of how they are otherwise described or limited. Thus, any such sequences are available for use in carrying out any of the methods disclosed according to the invention. Such sequences also include any open reading frames, as defined herein, present within any of the sequences of SEQ ID NO: 1-1067.

[0036] Further in accordance with the present invention, the term “percent identity” or “percent identical,” when referring to a sequence, means that a sequence is compared to a claimed or described sequence after alignment of the sequence to be compared (the “Compared Sequence”) with the described or claimed sequence (the “Reference Sequence”). The Percent Identity is then determined according to the following formula:

Percent Identity=100[1−(C/R)]

[0037] wherein C is the number of differences between the Reference Sequence and the Compared Sequence over the length of alignment between the Reference Sequence and the Compared Sequence wherein (i) each base or amino acid in the Reference Sequence that does not have a corresponding aligned base or amino acid in the Compared Sequence and (ii) each gap in the Reference Sequence and (iii) each aligned base or amino acid in the Reference Sequence that is different from an aligned base or amino acid in the Compared Sequence, constitutes a difference; and R is the number of bases or amino acids in the Reference Sequence over the length of the alignment with the Compared Sequence with any gap created in the Reference Sequence also being counted as a base or amino acid.

[0038] If an alignment exists between the Compared Sequence and the Reference Sequence for which the percent identity as calculated above is about equal to or greater than a specified minimum Percent Identity then the Compared Sequence has the specified minimum percent identity to the Reference Sequence even though alignments may exist in which the hereinabove calculated Percent Identity is less than the specified Percent Identity.

[0039] As used herein, the terms “portion,” “segment,” and “fragment,” when used in relation to polypeptides, refer to a continuous sequence of residues, such as amino acid residues, which sequence forms a subset of a larger sequence. For example, if a polypeptide were subjected to treatment with any of the common endopeptidases, such as trypsin or chymotrypsin, the oligopeptides resulting from such treatment would represent portions, segments or fragments of the starting polypeptide. When used in relation to a polynucleotides, such terms refer to the products produced by treatment of said polynucleotides with any of the common endonucleases, or any stretch of polynucleotides that could be synthetically synthesized.

[0040] As used herein and except as noted otherwise, all terms are defined as given below.

[0041] In accordance with the present invention, the term “DNA segment” or “DNA sequence” refers to a DNA polymer, in the form of a separate fragment or as a component of a larger DNA construct, which has been derived from DNA isolated at least once in substantially pure form, i.e., free of contaminating endogenous materials and in a quantity or concentration enabling identification, manipulation, and recovery of the segment and its component nucleotide sequences by standard biochemical methods, for example, using a cloning vector. Such segments are provided in the form of an open reading frame uninterrupted by internal nontranslated sequences, or introns, which are typically present in eukaryotic genes. Sequences of non-translated DNA may be present downstream from the open reading frame, where the same do not interfere with manipulation or expression of the coding regions.

[0042] The term “coding region” refers to that portion of a gene which either naturally or normally codes for the expression product of that gene in its natural genomic environment, i.e., the region coding in vivo for the native expression product of the gene. The coding region can be from a normal, mutated or altered gene, or can even be from a DNA sequence, or gene, wholly synthesized in the laboratory using methods well known to those of skill in the art of DNA synthesis.

[0043] In accordance with the present invention, the term “nucleotide sequence” refers to a heteropolymer of deoxyribonucleotides. Generally, DNA segments encoding the proteins provided by this invention are assembled from cDNA fragments and short oligonucleotide linkers, or from a series of oligonucleotides, to provide a synthetic gene which is capable of being expressed in a recombinant transcriptional unit comprising regulatory elements derived from a microbial or viral operon.

[0044] The term “expression product” means that polypeptide or protein that is the natural translation product of the gene and any nucleic acid sequence coding equivalents resulting from genetic code degeneracy and thus coding for the same amino acid(s).

[0045] The term “fragment,” when referring to a coding sequence, means a portion of DNA comprising less than the complete coding region whose expression product retains essentially the same biological function or activity as the expression product of the complete coding region.

[0046] The term “primer” means a short nucleic acid sequence that is paired with one strand of DNA and provides a free 3′-OH end at which a DNA polymerase starts synthesis of a deoxyribonucleotide chain.

[0047] The term “promoter” means a region of DNA involved in binding of RNA polymerase to initiate transcription. The term “enhancer” refers to a region of DNA that, when present and active, has the effect of increasing expression of a different DNA sequence that is being expressed, thereby increasing the amount of expression product formed from said different DNA sequence.

[0048] The term “open reading frame (ORF)” means a series of triplets coding for amino acids without any termination codons and is a sequence (potentially) translatable into protein.

[0049] As used herein, reference to a DNA sequence includes both single stranded and double stranded DNA. Thus, the specific sequence, unless the context indicates otherwise, refers to the single strand DNA of such sequence, the duplex of such sequence with its complement (double stranded DNA) and the complement of such sequence.

[0050] In carrying out the foregoing assays, relative antineoplastic activity may be ascertained by the extent to which a given chemical agent modulates the expression of genes present in a cancerous cell. Thus, a first chemical agent that modulates the expression of a gene associated with the cancerous state (i.e., a gene that includes one of the sequences disclosed herein and present in cancerous cells) to a larger degree than a second chemical agent tested by the assays of the invention is thereby deemed to have higher, or more desirable, or more advantageous, anti-neoplastic activity than said second chemical agent. Alternatively, where first and second chemical agents modulate expression of more than one of said genes, but where the second modulates expression of, for example, five said genes, whereas the first modulates expression of only three of said genes, especially where the three form a subset of the five, then the second chemical agent is deemed a more potent anti-neoplastic agent than the first. Such anti-neoplastic activity, as determined using the assays of the present invention, may necessarily include combinations of the foregoing possibilities, which are in no way to be considered limiting.

[0051] In utilizing these gene sequences for the assays according to the invention, the genes whose activity is to be determined with and without the presence of the compound to be evaluated for antitumor activity may be any one, or several, or any combination of the gene sequences disclosed herein as SEQ ID NO: 1-1067. However, how the gene sequences are employed in such assays depends on the pattern of gene expression disclosed for the signature sets for colon. For example, a sequence that is expressed in cancerous cells but not in normal cells will identify a potential anticancer agent by that agents ability to decrease expression of the sequence, or sequences, in tumor cells. Conversely, a sequence, or sequences, expressed in normal but not tumor cells will identify a potential antitumor agent by its ability to increase expression in the tumor cells. The same relationship holds true where the sequences are expressed in both cancer and normal cells but are expressed at a higher level in one than in the other, and vice versa. Based on the expression patterns disclosed for the gene sequences and signature sets disclosed herein, it should be readily apparent to those skilled in the art how to conduct assays for potential antitumor agents using the signature gene sets. The same holds true where the sequences, or signature gene sets, are utilized to determine the cancerous state of a cell or use of an agent to treat a cancerous condition.

[0052] Thus, in one aspect, the present invention relates to a process for screening for an anti-neoplastic agent comprising the steps of (a) exposing cells to a chemical agent to be tested for antineoplastic activity, and (b) determining a change in expression of at least one gene of a signature gene set, or a sequence that is at least 95% identical thereto, wherein a change in expression is indicative of anti-neoplastic activity. Such change in expression is intended to mean a change include any activity of the gene, and may be an increase or decrease thereof. In addition, such change in activity may be a change in expression or other activity of at least 1 such gene, such as 5 or 10, or more of the genes of a signature set, even as many as half of such genes or even of all of the genes of a particular gene set.

[0053] The gene expression to be measured is commonly assayed using RNA expression as an indicator. Thus, the greater the level of RNA (messenger RNA) detected the higher the level of expression of the corresponding gene. Thus, gene expression, either absolute or relative, such as where the expression of several different genes are being quantitatively evaluated and compared, for example, where chemical agents modulate the expression of more than one gene, such as a set of 3, 4, 5, or more genes, is determined by the relative expression of the RNAs encoded by such genes.

[0054] RNA may be isolated from samples in a variety of ways, including lysis and denaturation with a phenolic solution containing a chaotropic agent (e.g., triazol) followed by isopropanol precipitation, ethanol wash, and resuspension in aqueous solution; or lysis and denaturation followed by isolation on solid support, such as a Qiagen resin and reconstitution in aqueous solution; or lysis and denaturation in non-phenolic, aqueous solutions followed by enzymatic conversion of RNA to DNA template copies.

[0055] Normally, prior to applying the processes of the invention, steady state RNA expression levels for the genes, and sets of genes, disclosed herein will have been obtained. It is the steady state level of such expression that is affected by potential anti-neoplastic agents as determined herein. Such steady state levels of expression are easily determined by any methods that are sensitive, specific and accurate. Such methods include, but are in no way limited to, real time quantitative polymerase chain reaction (PCR), for example, using a Perkin-Elmer 7700 sequence detection system with gene specific primer probe combinations as designed using any of several commercially available software packages, such as Primer Express software., solid support based hybridization array technology using appropriate internal controls for quantitation, including filter, bead, or microchip based arrays, solid support based hybridization arrays using, for example, chemiluminescent, fluorescent, or electrochemical reaction based detection systems.

[0056] In one embodiment of the present invention, a set of genes useful in evaluating, or screening, or otherwise assaying, one or more chemical agents for anti-neoplastic activity in the assays disclosed herein will have already been shown to have differences in the ratios of steady state RNA levels in cancer cells, or tissues, relative to normal, or non-tumorous cells or tissues, or will have exhibited differences in the expression ratios in tumor samples compared to normal samples between genes in a given subset of the set of genes disclosed herein, or will have gene expression that has increased from undetectable levels to detectable levels, or vice versa, as the case may be, especially where sensitive detection methods are employed, or conversely will have decreased from detectable levels to undetectable levels with such procedures, especially sensitive procedures.

[0057] The genes, and gene sequences, useful in practicing the methods of the present invention are genes that are found to be selectively expressed in, or not expressed in, cancer cells as compared to non-cancer cells, or in which expression is down-regulated or up-regulated, as the case may be, in cancerous cells as compared to non-cancerous cells. Thus, these may include genes, or sets of genes, expressed in cancer cells but absent from, or inactive in, non-cancerous cells, or may include genes, or sets of genes, expressed in non-cancerous cells, but not expressed in cancer cells. Alternatively, the genes useful in practicing the present invention may be more expressed, or less expressed, in a cancerous cell relative to a non-cancerous cell. Such genes are generally those comprising the sequences of SEQ ID NO: 1-1067.

[0058] All of these sequences are provided herewith on CD-ROM only.

[0059] In accordance with the foregoing, the present invention further relates to a process for determining the cancerous status of a test cell, comprising determining expression in said test cell of at least one gene that includes one of the nucleotide sequences selected from the sequences of SEQ ID NO: 1-1067, or a nucleotide sequence that is at least 95% identical thereto, and then comparing said expression to expression of said at least one gene in at least one cell known to be non-cancerous whereby a difference in said expression indicates that said cell is cancerous.

[0060] In a particular embodiment, the present invention is directed to a process for determining the cancerous status of a cell to be tested, comprising determining the presence in said cell of at least one gene that includes one of the nucleotide sequences selected from the sequences of SEQ ID NO: 1-1067, including sequences having substantial identity homologous to said sequences, or characteristic fragments thereof, or the complements of any of the foregoing and then comparing the pattern of said gene presence and/or absence with that found for a cell known, or believed, to be non-cancerous, or normal, at least with respect to its genetic complement.

[0061] With respect to genes that include at least one of the sequences of SEQ ID NO: 1-1067, up regulation of expression in cancer cells (as compared to non-cancer cells, which may lack said genes, or said gene expression, altogether) is indicative of a cancerous, or potentially cancerous, condition.

[0062] In specific embodiments, the present invention relates to embodiments wherein the genetic pattern is the modulation of expression of more than one gene, preferably 3, 4, or 5 genes, and even includes patterns where there is a modulation of expression of as many as 10, or more, genes. Thus, where a genetic pattern is the modulation of expression of 5 genes in a cancerous cell as compared to a non-cancerous cell from the same tissue type, such as a cancerous colon cell, versus a non-cancerous colon cell, such a pattern indicates a likelihood that such genes (i.e., the modulation of expression of those 5 genes) is an indicator of cancerous status and thereby provides a means of diagnosing a cancerous, or potentially cancerous, status. The absence of a specific set of genes from cancerous cells where said genes are present in otherwise normal cells, especially those of a similar type, is also indicative of a correlation with the cancerous state and thus can likewise be used as a means of diagnosing the cancerous state in other cells suspected of being cancerous.

[0063] In accordance with the foregoing, with respect to colon, especially colon adenocarcinoma, this would include SEQ ID NO: 1-333 (expressed in normal colon cells but not in colon cancer cells), SEQ ID NO: 334-522 (expressed at elevated levels in colon adenocarcinoma but not expressed in normal colon cells), SEQ ID NO: 523-837 (expressed at reduced levels, more than 2.09 fold, in colon adenocarcinoma but not in normal colon cells) and SEQ ID NO: 838-1067 (expressed at elevated (at least 2.1 fold) levels in colon adenocarcinoma but not elevated in normal colon cells). Thus, the above groupings of sequences represent four signature gene sets for colon. For example, SEQ ID NO: 334-522 would represent a signature set or signature gene set for colon.

[0064] The gene patterns indicative of a cancerous state need not be characteristic of every cell found to be cancerous. Thus, the methods disclosed herein are useful for detecting the presence of a cancerous condition within a tissue where less than all cells exhibit the complete pattern. For example, a set of selected genes, comprising sequences homologous under stringent conditions, or at least 90%, preferably 95%, identical to at least one of the sequences of SEQ ID NO: 1-1067, and wherein the signature set is comprised of genes expressed and/or up-regulated in cancer cells relative to normal cells, as disclosed above for the four signature gene sets used for practicing this invention, may be found, using appropriate probes, either DNA or RNA, to be present in as little as 60% of cells derived from a sample of tumorous, or malignant, tissue while being absent from as much as 60% of cells derived from corresponding non-cancerous, or otherwise normal, tissue (and thus being present in as much as 40% of such normal tissue cells). In a preferred embodiment, such gene pattern is found to be present in at least 70% of cells drawn from a cancerous tissue and absent from at least 70% of a corresponding normal, non-cancerous, tissue sample. In an especially preferred embodiment, such gene pattern is found to be present in at least 80% of cells drawn from a cancerous tissue and absent from at least 80% of a corresponding normal, non-cancerous, tissue sample. In a most preferred embodiment, such gene pattern is found to be present in at least 90% of cells drawn from a cancerous tissue and absent from at least 90% of a corresponding normal, non-cancerous, tissue sample. In an additional embodiment, such gene pattern is found to be present in at least 100% of cells drawn from a cancerous tissue and absent from at least 100% of a corresponding normal, non-cancerous, tissue sample, although the latter embodiment may represent a rare occurrence.

[0065] Conversely, where the signature set is expressed or up-regulated in normal cells versus cancerous cells, as disclosed herein, expression in the normal cells but not in suspected cancerous cells may confirm a cancerous state in the suspected cancerous sample. The same is true for assays disclosed herein for potential antitumor agents.

[0066] Although the presence or absence of expression of one or more selected gene sequences may be indicative of a cancerous status for a given cell, the mere presence or absence of such a gene pattern may not alone be sufficient to achieve a malignant condition and thus the level of expression of such gene pattern may also be a significant factor in determining the attainment of a cancerous state. Thus, while a pattern of genes may be present in both cancerous and non-cancerous cells, the level of expression, and determined by any of the methods disclosed herein, all of which are well known in the art, may differ between the cancerous versus the non-cancerous cells. Thus, it becomes essential to also determine the level of expression of one or more of said genes as a separate means of diagnosing the presence of a cancerous status for a given cell, groups of cells, or tissues, either in culture or in situ.

[0067] In accordance with the invention disclosed herein, a determination of an anticancer agent using the signature gene sets for colon described above is based on patterns of modulation of such genes so that increase or decrease in expression of a gene due to the presence of such a potential agent may or may not be meaningful. Thus, the more genes in a gene set that are affected by said agent the more likely said agent is an effective therapeutic agent.

[0068] In addition, different agents may have different abilities to affect the genes of a signature gene set. For example, if a potential therapeutic agent, say, agent A, causes a gene or group of genes of a characteristic or signature gene set, or even all of the genes of said gene set, to exhibit decreased expression, such as where a lower amount of mRNA is expressed from said gene(s), or less protein is produced from said mRNA, but a second potential agent, say, agent B, while modulating the activity of the same or related genes causes said expression to be reduced to half, such as where only half as much mRNA is transcribed or only half as much protein is translated from said mRNA as for agent A, then agent B is considered to have twice as much therapeutic potential as agent A.

[0069] Such modulation or change of activity as determined using the assays disclosed herein may include either an increase or a decrease in activity of said genes or gene sequences. Thus, where a gene is expressed in cancer cells but not in normal cells, or is up-regulated in cancer cells relative to normal cells of colon, an agent that down-regulates said gene or genes, or gene sequences, or prevents their expression entirely, is considered a potential antitumor agent within the present disclosure. Conversely, where an agent causes expression of a gene or genes, or gene sequences, expressed in normal cells but not in cancer cells, or where said agent up-regulates a gene or genes, or gene sequences, that are expressed in normal cells but not in cancer cells, or are up-regulated in normal cells but not in cancer cells of colon, said agent is considered to be a potential antitumor agent within the present disclosure.

[0070] The present invention also relates to a method for producing a product comprising identifying an agent according to one of the disclosed processes for identifying such an agent wherein said product is the data collected with respect to said agent as a result of said identification process and wherein said data is sufficient to convey the chemical character and/or structure and/or properties of said agent.

[0071] In accordance with the foregoing, the present invention further relates to a process for determining the cancerous status of a cell to be tested, comprising determining the level of expression in said cell of at least one gene that includes one of the nucleotide sequences selected from the sequences of SEQ ID NO: 1-1067, including sequences substantially identical to said sequences, or characteristic fragments thereof, or the complements of any of the foregoing and then comparing said expression to that of a cell known to be non-cancerous whereby the difference in said expression indicates that said cell to be tested is cancerous.

[0072] In specific embodiments of the present invention, said expression is determined for more than one of said genes, such as 2, 3, 4, 5, or more such genes, considered as a set, and even as many as a set of 10 such genes. A set of genes, for example, 5 such genes, may be found to be expressed at certain levels in cancer cells but are found to be expressed at lower levels (or not expressed at all) in non-cancerous, or normal, cells. Conversely, a set of, for example, 5 such genes may be found to be expressed in normal (i.e., non-cancerous) cells but expressed at lower levels (or not expressed at all) in cancer cells. Thus, by determining the set or pattern of genes expressed in cancer cells but expressed at lower levels (or not at all) in non-cancer, or vice versa, a method is achieved for diagnosing cancerous conditions wherein said genes are selected from those that include one of the sequences, or fragments of sequences, including complementary sequences, selected from SEQ ID NO: 1-1067.

[0073] In specific embodiments, the processes of the present invention include embodiments wherein said expression is the expression of more than one said gene, possibly at least three said genes, preferably at least 5 said genes, or even as many as 10 or more said genes.

[0074] In other embodiments, the process of the invention relates to situations wherein expression of said genes is higher in said cells to be tested than in said non-cancerous cells, or wherein expression of said genes is lower in said cells to be tested than in said non-cancerous cells.

[0075] Using the methods disclosed herein, the cancerous, or non-cancerous, status of a cell, or tissue sample, may be readily ascertained. For example, colon or other cancers can be readily detected using the methods of the present invention.

[0076] In accordance with the invention, although gene expression for a gene that includes as a portion thereof one of the nucleotide sequences of SEQ ID NO: 1-1067, is preferably determined by use of a probe that is a fragment of such nucleotide sequence, it is to be understood that the probe may be formed from a different portion of the gene. Thus, for each gene of the signature sets of the present invention, the nucleotide sequence disclosed with respect to a specific sequence ID number is only a portion of the nucleotide sequence that encodes expression of the gene. As a result, expression of the gene may be determined by use of a nucleotide probe that hybridizes to messenger RNA (mRNA) transcribed from a portion of the gene other than the specific nucleotide sequence disclosed with reference to a sequence ID number as recited herein.

[0077] The present invention further relates to a process for determining a cancer initiating, facilitating or suppressing gene comprising the steps of contacting a cell with a cancer modulating agent and determining a change in expression of a gene selected from the group consisting of the gene sequences of SEQ ID NO: 1-1067 and thereby identifying said gene as being a cancer initiating or facilitating gene.

[0078] Thus, some or all of the genes within the signature gene sets disclosed herein as SEQ ID NO: 1-1067 are found to play a direct role in the initiation or progression of cancer or even other diseases and disease processes. Because changes in expression of these genes (either up-regulation or down-regulation) are linked to the disease state (i.e. cancer), the change in expression may contribute to the initiation or progression of the disease. For example, if a gene that is up-regulated is an oncogene, or if a gene that is down-regulated is a tumor suppressors, such a gene provides for a means of screening for small molecule therapeutics beyond screens based upon expression output alone. For example, genes that display up-regulation in cancer and whose elevated expression contributes to initiation or progression of disease represent targets in screens for small molecules that inhibit or block their function. Examples include, but are not be limited to, kinase inhibition, cellular proliferation, substrate analogs that block the active site of protein targets, etc. Similarly, genes that display down-regulation in cancer and whose absence results in initiation or progression of disease are valuable therapeutics for gene therapy.

[0079] It should be noted that there are a variety of different contexts in which genes have been evaluated as being involved in the cancerous process. Thus, some genes may be oncogenes and encode proteins that are directly involved in the cancerous process and thereby promote the occurrence of cancer in an animal. In addition, other genes may serve to suppress the cancerous state in a given cell or cell type and thereby work against a cancerous condition forming in an animal. Other genes may simply be involved either directly or indirectly in the cancerous process or condition and may serve in an ancillary capacity with respect to the cancerous state. All such types of genes are deemed with those to be determined in accordance with the invention as disclosed herein. Thus, the gene determined by said process of the invention may be an oncogene, or the gene determined by said process may be a cancer facilitating gene, the latter including a gene that directly or indirectly affects the cancerous process, either in the promotion of a cancerous condition or in facilitating the progress of cancerous growth or otherwise modulating the growth of cancer cells, either in vivo or ex vivo. In addition, the gene determined by said process may be a cancer suppressor gene, which gene works either directly or indirectly to suppress the initiation or progress of a cancerous condition. Such genes may work indirectly where their expression alters the activity of some other gene or gene expression product that is itself directly involved in initiating or facilitating the progress of a cancerous condition. For example, a gene that encodes a polypeptide, either wild or mutant in type, which polypeptide acts to suppress of tumor suppressor gene, or its expression product, will thereby act indirectly to promote tumor growth.

[0080] In accordance with the foregoing, the process of the present invention includes cancer modulating agents that are themselves either polypeptides, or small chemical entities, that affect the cancerous process, including initiation, suppression or facilitation of tumor growth, either in vivo or ex vivo. Said cancer modulating agent may have the effect of increasing gene expression or said cancer modulating agent may have the effect of decreasing gene expression as such terms have been described herein.

[0081] In keeping with the disclosure herein, the present invention also relates to a process for treating cancer comprising contacting a cancerous cell with an agent having activity against an expression product encoded by a gene sequence selected from the group consisting of SEQ ID NO: 1-1067.

[0082] Thus, some or all of the genes within these signature gene sets represent individual targets for therapeutic intervention, based at least in part on their pattern(s) of expression. For example, genes within the signature gene sets that encode cell surface molecules and are up-regulated in cancer as compared to normal cells. The proteins encoded by such genes, due to their elevated expression in cancer cells, represent highly useful therapeutic targets for “targeted therapies” utilizing such affinity structures as, for example, antibodies coupled to some cytotoxic agent. In such methodology, it is advantageous that nothing need be known about the endogenous ligands or binding partners for such cell surface molecules. Rather, an antibody or equivalent molecule that can specifically recognize the cell surface molecule (which could include an artificial peptide, a surrogate ligand, and the like) that is coupled to some agent that can induce cell death or a block in cell cycling offers therapeutic promise against these proteins. Thus, such approaches include the use of so-called suicide “bullets” against intracellular proteins

[0083] The process of the present invention includes embodiments of the above-recited process wherein said cancer cell is contacted in vivo as well as ex vivo, preferably wherein said agent comprises a portion, or is part of an overall molecular structure, having affinity for said expression product. In one such embodiment, said portion having affinity for said expression product is an antibody, especially where said expression product is a polypeptide or oligopeptide or comprises an oligopeptide portion, or comprises a polypeptide.

[0084] Such an agent can therefore be a single molecular structure, comprising both affinity portion and anti-cancer activity portions, wherein said portions are derived from separate molecules, or molecular structures, possessing such activity when separated and wherein such agent has been formed by combining said portions into one larger molecular structure, such as where said portions are combined into the form of an adduct. Said anti-cancer and affinity portions may be joined covalently, such as in the form of a single polypeptide, or polypeptide-like, structure or may be joined non-covalently, such as by hydrophobic or electrostatic interactions, such structures having been formed by means well known in the chemical arts. Alternatively, the anti-cancer and affinity portions may be formed from separate domains of a single molecule that exhibits, as part of the same chemical structure, more than one activity wherein one of the activities is against cancer cells, or tumor formation or growth, and the other activity is affinity for an expression product produced by expression of genes related to the cancerous process or condition.

[0085] In one embodiment of the present invention, a chemical agent, such as a protein or other polypeptide, is joined to an agent, such as an antibody, having affinity for an expression product of a cancerous cell, such as a polypeptide or protein encoded by a gene related to the cancerous process, especially a gene sequence selected from the group consisting of the sequences of SEQ ID NO: 1-1067. In a specific embodiment, said expression product is a cell surface receptor, such as a protein or glycoprotein or lipoprotein, present on the surface of a cancer cell, such as where it is part of the plasma membrane of said cancer cell, and acts as a therapeutic target for the affinity portion of said anticancer agent and where, after binding of the affinity portion of such agent to the expression product, the anti-cancer portion of said agent acts against said expression product so as to neutralize its effects in initiating, facilitating or promoting tumor formation and/or growth. In a separate embodiment of the present invention, binding of the agent to said expression product may, without more, have the effect of deterring cancer promotion, facilitation or growth, especially where the presence of said expression product is related, either intimately or only in an ancillary manner, to the development and growth of a tumor. Thus, where the presence of said expression product is essential to tumor initiation and/or growth, binding of said agent to said expression product will have the effect of negating said tumor promoting activity. In one such embodiment, said agent is an apoptosis-inducing agent that induces cell suicide, thereby killing the cancer cell and halting tumor growth.

[0086] As disclosed herein, the present invention further relates to a process for determining a cancer initiating, facilitating or suppressing gene in a cancer cell comprising determining a change in expression of a gene sequence, especially where said sequence is one selected from the group consisting of the sequences of SEQ ID NO: 1-1067.

[0087] Thus, the processes of the present invention take advantage of the correlation of changes in mRNA expression profiles of these signature gene sets with potential (depending on the form of cancer) changes in DNA copy number of the chromosomal regions wherein these genes are located. Of course, the precise nature of the change in mRNA expression (e.g. a signature set of genes that are up-regulated at the transcriptional level) may also indicate a change in the DNA copy number for the genomic regions in which these genes are located (e.g. an amplification of the genomic DNA region that contains the involved gene or genes).

[0088] All cancers contain chromosomal rearrangements, which typically represent translocations, amplifications, or deletions of specific regions of genomic DNA. A recurrent chromosomal rearrangement that is associated with a specific stage and type of cancer always affects a gene (or possibly genes) that play a direct and critical role in the initiation or progression of the disease. Many of the known oncogenes or tumor suppressor genes that play direct roles in cancer have either been initially identified based upon their positional cloning from a recurrent chromosomal rearrangement or have been demonstrated to fall within a rearrangement subsequent to their cloning by other methods. In all cases, such genes display amplification at both the level of DNA copy number and at the level of transcriptional expression at the mRNA level.

[0089] At least some of the genes that are contained within signature gene sets disclosed herein (SEQ ID NO: 1-1067) display changes in their mRNA expression profiles (depending on the precise reading frame involved) within cancer samples due, in part, to changes in their DNA copy number as a result of specific chromosomal rearrangements in those cancer cells. The utilities that follow from this are (i) that the genes contained within these signature gene sets offer a time saving shortcut to the identification of novel chromosomal rearrangements, amplifications, or deletions that are associated with cancer, and/or (ii) represent key genes affected by such chromosomal rearrangements, amplifications, or deletions and, therefore, play a key role in the initiation or progression of the disease. Genes within the signature sets that identify changes in the DNA copy number (based upon their changes in expression at the mRNA level) thus afford an entry point into other forms of diagnostic assay for the initiation, staging, or progression of cancer to be conducted in tissue samples at the DNA level (e.g. if gene X identifies a novel chromosomal amplification associated with cancer, then that specific chromosomal region defined by gene X would serve as the basis for a diagnostic assay for cancer, where genomic DNA is extracted from tissue samples and evaluated for the presence of the specific amplification), and also the rapid positional cloning of genes that play vital and direct roles in the initiation or progression of cancer.

[0090] In one embodiment of the present invention, said change in expression may be determined by determining a change in gene copy number, wherein said change in copy number is an increase in copy number or wherein said change in copy number is a decrease in copy number.

[0091] Such change in gene copy number may be determined by determining a change in expression of messenger RNA encoded by a particular gene sequence, especially where said sequence is one selected from the group consisting of the sequences of SEQ ID NO: 1-1067. Also in accordance with the present invention, said gene may be a cancer initiating gene, a cancer facilitating gene, or a cancer suppressing gene. In carrying out the methods of the present invention, a cancer facilitating gene is a gene that, while not directly initiating or suppressing tumor formation or growth, said gene acts, such as through the actions of its expression product, to direct, enhance, or otherwise facilitate the progress of the cancerous condition, including where such gene acts against genes, or gene expression products, that would otherwise have the effect of decreasing tumor formation and/or growth.

[0092] Thus, the present invention also provides a process for diagnosing a cancerous cell comprising determining a cancer initiating, facilitating or suppressing gene according to the above-described methods.

[0093] The present invention also relates to a process for treating cancer comprising inserting into a cancerous cell a gene construct comprising an anti-cancer gene operably linked to a promoter or enhancer element such that expression of said anti-cancer gene causes suppression of said cancer and wherein said promoter or enhancer element is a promoter or enhancer element modulating a gene sequence selected from the group consisting of the sequences of SEQ ID NO: 1-1067.

[0094] Thus, the signature sets or signature gene sets disclosed herein are useful in identifying genetic regulatory elements within the promoters of the genes contained within the signature sets that are specific to normal tissue and/or the corresponding cancer. In accordance with this, each signature set is a collection of genes that share a gross common pattern of transcriptional regulation in cancer vs. normal (e.g. a signature set of genes that are transcriptionally up-regulated in cancer).

[0095] In one such embodiment, analyzing and comparing the DNA sequences of the promoter regions of all the genes contained within the signature set serves to identify conserved stretches or motifs of sequences within subsets of genes that represent cis-acting elements that specifically drive a form of gene expression (e.g. increased transcriptional expression in cancer). The identification of such cis-acting regulatory elements is then available for use in driving the cancer-specific expression of suicide genes or toxins via genetic therapy using technology already well known in the art.

[0096] In separate embodiments, said anti-cancer gene is a cancer suppressor gene or encodes a polypeptide having anticancer activity, especially where said polypeptide has apoptotic activity.

[0097] In additional embodiments, the present invention such insertion of said gene construct into a cancerous cell is accomplished in vivo, for example using a viral or plasmid vector. Such methods can also be applied to in vitro uses. Thus, the methods of the present invention are readily applicable to different forms of gene therapy, either where cells are genetically modified ex vivo and then administered to a host or where the gene modification is conducted in vivo using any of a number of suitable methods involving vectors especially suitable to such therapies, such as the use of special viral vectors, including adeno-associated viruses and adenoviruses, as well as retroviruses and specially constructed plasmids to accomplish such therapies. The use of these and other vectors is well known to those skilled in the art and need not be described further.

[0098] The present method also relates to a process for determining functionally related genes comprising contacting one or more gene sequences selected from the group consisting of the sequences of SEQ ID NO: 1-1067 with an agent that modulates expression of more than one gene in such group and thereby determining a subset of genes of said group.

[0099] In accordance with the present invention, said functionally related genes are genes modulating the same metabolic pathway or said genes are genes encoding functionally related polypeptides. In one such embodiment, said genes are genes whose expression is modulated by the same transcriptional activator or enhancer sequence, especially where said transcriptional activator or enhancer increases, or otherwise modulates, the activity of a gene sequence selected from the group consisting of SEQ ID NO: 1-1067.

[0100] Thus, the signature gene set disclosed herein also find use as the basis for small molecule assays for therapeutics based upon changes in expression profile. In one such embodiment, small molecule screens serve to identify changes in expression of genes within a signature set and thereby provide a tool for the identification of specific functional pathways and a means of assigning defined functions to novel genes.

[0101] In accordance with the foregoing, monitoring the transcriptional expression of the genes contained within the signature sets disclosed herein forms the basis of an assay for small molecule therapeutics. For example, in situations where a signature set of genes that are transcriptionally up-regulated in cancer cells compared to normal cells, such screens facilitate the identification of small molecules that down-regulate the expression of the genes of the signature set within cancer cells. While such therapeutics make a cancer cell “look” more normal, based upon the expression of the genes within the signature set, what actually happens when such screens are put into practice is that all genes within the signature sets do not respond identically to each small molecule within a chemical compound library. If an average signature set contains 200 different genes, for example, and the expression of all 200 genes is monitored in response to a library of some 50,000 chemical compounds, and subsets of genes within the signature set consistently change their patterns of expression in response to particular chemicals (e.g., 10 of the genes always change expression in a coordinated way, such as down-regulation of one gene within the group of 10) then it always causes the down-regulation of the other 9 specific genes as well.

[0102] Such subsets or subgroups of genes within each signature set that change their expression in a coordinated way in response to chemical compounds represent genes that are located within a common metabolic, signaling, physiological, or functional pathway so that by analyzing and identifying such subsets one can (a) assign known genes and novel genes to specific pathways and (b) identify specific functions and functional roles for novel genes that are grouped into pathways with genes for which their functions are already characterized or described. For example, one might identify a subgroup of 10 genes within a signature set (5 known genes & 5 novel genes) that change expression in a coordinated fashion and for which the 5 known genes are involved in apoptosis thereby implicating the other 5 novel genes as playing a role in apoptotic cellular processes. Therefore, the processes disclosed according to the present invention at once provide a novel means of assigning function to genes, i.e. a novel method of functional genomics, and a means for identifying chemical compounds that have potential therapeutic effects on specific cellular pathways. Such chemical compounds may have therapeutic relevance to a variety of diseases outside of cancer as well, in cases where such diseases are known or are demonstrated to involve the specific cellular pathway that is affected.

[0103] It should be cautioned that, in carrying out the procedures of the present invention as disclosed herein, any reference to particular buffers, media, reagents, cells, culture conditions and the like are not intended to be limiting, but are to be read so as to include all related materials that one of ordinary skill in the art would recognize as being of interest or value in the particular context in which that discussion is presented. For example, it is often possible to substitute one buffer system or culture medium for another and still achieve similar, if not identical, results. Those of skill in the art will have sufficient knowledge of such systems and methodologies so as to be able, without undue experimentation, to make substitutions that will optimally serve their purposes in using the methods and procedures disclosed herein.

[0104] The present invention will now be further described by way of the following non-limiting example but it should be kept clearly in mind that other and different embodiments of the methods disclosed according to the present invention will no doubt suggest themselves to those of skill in the relevant art.

### EXAMPLE

[0105] SW480 cells are grown to a density of 10⁵ cells/cm² in Leibovitz's L-15 medium supplemented with 2 mM L-glutamine (90%) and 10% fetal bovine serum. The cells are collected after treatment with 0.25% trypsin, 0.02% EDTA at 37° C. for 2 to 5 minutes. The trypsinized cells are then diluted with 30 ml growth medium and plated at a density of 50,000 cells per well in a 96 well plate (200 μl/well). The following day, cells are treated with either compound buffer alone, or compound buffer containing a chemical agent to be tested, for 24 hours. The medium is then removed, the cells lysed and the RNA recovered using the RNAeasy reagents and protocol obtained from Qiagen. RNA is quantitated and 10 ng of sample in 1 μl are added to 24 μl of Taqman reaction mix containing 1×PCR buffer, RNAsin, reverse transcriptase, nucleoside triphosphates, amplitaq gold, tween 20, glycerol, bovine serum albumin (BSA) and specific PCR primers and probes for a reference gene (18S RNA) and a test gene (Gene X). Reverse transcription is then carried out at 48° C. for 30 minutes. The sample is then applied to a Perlin Elmer 7700 sequence detector and heat denatured for 10 minutes at 95° C. Amplification is performed through 40 cycles using 15 seconds annealing at 60° C. followed by a 60 second extension at 72° C. and 30 second denaturation at 95° C. Data files are then captured and the data analyzed with the appropriate baseline windows and thresholds.

[0106] The quantitative difference between the target and reference genes is then calculated and a relative expression value determined for all of the samples used. This procedure is then repeated for each of the target genes in a given signature, or characteristic, set and the relative expression ratios for each pair of genes is determined (i.e., a ratio of expression is determined for each target gene versus each of the other genes for which expression is measured, where each gene's absolute expression is determined relative to the reference gene for each compound, or chemical agent, to be screened). The samples are then scored and ranked according to the degree of alteration of the expression profile in the treated samples relative to the control. The overall expression of the set of genes relative to the controls, as modulated by one chemical agent relative to another, is also ascertained. Chemical agents having the most effect on a given gene, or set of genes, are considered the most anti-neoplastic.

[0107] In carrying out the methods of the invention, it is to be expected that not all cells of a given sample of suspected cancerous cells will express all, or even most, of these genes but that a substantial expression thereof in a substantial number of such cells is sufficient to warrant a determination of a cancerous, or potentially cancerous, condition. The sequences disclosed herein are presented in numerical order from SEQ ID NO: 1 to 1067 and some may be up-regulated in cancer and not normal cells while other are up-regulated in normal cells but not cancerous cells. The sequences presented herein may be genomic or cDNA sequences and may also be represented as RNA sequences. The sequences of the sequence listing herein are mostly cDNA sequences but can be used to locate genomic sequences.

The application's sequence listing, which the Patent Office published only in electronic form, follows.

SEQUENCE LISTING (1067 sequences)

SEQ ID NO: 1 - DNA, 447 bp, Homo sapiens
  misc_feature (1)...(447): n=a,t,g or c
tttttttgcttttccccctctatctcaaatgcctcactccgggacaaatattccttcttagcactacttaacataaataaatcaattttggctcttcaaagtcattctgcatataatcctgtcacccttataggagcctactgtacattctcattgtgaaccaatctctctttacattcacaatattatgatgcnttcacngggaggggctcttccccaaggtaaatgtagctcatttaanaaactacagtggggctctgtgatctatgtacacatgtatgtcacatatttgaccatttaaaaaacacagaaacccttgagactttctgtaaaattttgggatcataaaatatattaaaaagcagaccaaaggcaaggcattctggttctctgacgtcccccggtctagtttaattcattttcccagtattggggaaaagcagggca

SEQ ID NO: 2 - DNA, 405 bp, Homo sapiens
  misc_feature (1)...(405): n=a,t,g or c
aaatatggaacgcttcacgaatttgcgtgtcatccttgcgcaggggccatgctaatcttctctgtatcgttccaattttagtatatgtgctgccgaagcgagcaccgtgcttagttattctaagtgagggccccaggatccacctgcctaggcttcccaaagtgctgggattacaggcgtgacccaccgcgcccagccaagttttggtttcctcaactggaggtaatattacatattttacttatacatatgcataagtaaacaaagagggttgttttgagggtcaaataaattgatggatgttaacgctctnctggtaaattataaagcactatacaaatacaaggcattattgttaataatagagcttaattacacctgtcctcatttgatctctcanagacc

SEQ ID NO: 3 - DNA, 364 bp, Homo sapiens
  misc_feature (1)...(364): n=a,t,g or c
gttttaaaacatttctttattagtatatagacagtaaagcatgaaatagatacaaacattacttataaaaatgttttgaaagaacatttgaaaaatagatgaatgtcttctagccagttaatagcagagaaagaatttagttttggtagctcataagtcagtaaccgtatgccatgtctccagaagtaaaatccgtctgttttccagaaaaatgtgatgtagngaattntcattttatgtgttattttgcactcattaatgtaaattttagatttaaaaaaatcaagtttatttgctttctaagaaaatggnctccttncccattcgccagtagnttaatatatgttctacggtgtgggtgtgt

SEQ ID NO: 4 - DNA, 158 bp, Homo sapiens
ttttttttttgcaagaaacacatggggatggttttatttttataattggttaaaaaagtttctcaaagtgaagtttaggagtgagttttagtgttttgtaatttgaagaaaagtgtcttaaaattcaaagataccaatggaaagataaaagtttgggg

SEQ ID NO: 5 - DNA, 271 bp, Homo sapiens
gatttttcaaaattaacttttttattaatttaaaaatccagaaatacagtgactacataaataagtaccataattaggtacatgtcctgtgagaacagtgaaagggtaatactgttatgttactcttacttgtttacatgagttaactagaaaatggctacaactgctaaatgatgcttatggtctttgttgttccaagtgtttatgatacaaataaatacacaagaagaaccacatccattcttctctactaactacaggcagcttgggg

SEQ ID NO: 6 - DNA, 486 bp, Homo sapiens
  misc_feature (1)...(486): n=a,t,g or c
ttccaagaagaacatttttctgtttattcttagaatgtgaattttttttttcaactcagggccaagtacaaacttttgatttttgaaattttttcaactcagggccaagtacaatcttttgatttaaaaattttttttcatgaacaaaccatcagtagttattaaggagcccaagaaataggagatgtgaaagcaggatttctttgtgtttcctttgaatgttgttattttgagtattatcattatcaggtagaggaagaaaggtaggctgggaagtaggtccttatgatatcttgactatggatcccagatttacatttcacctngtcacagagcacacataatttaagataaacatgtcaagaatgacataaaccagaggtaaacaccaaggagctttacatttggaaccngaaaataaaaattagaaaaattattaccccatattaataaccaaaaaattacttaaactcctaggnccccngg

SEQ ID NO: 7 - DNA, 502 bp, Homo sapiens
  misc_feature (1)...(502): n=a,t,g or c
cacatttttccatctaatttttatttggagaaaataatttcagtatgaaattattctaataaaattattctaacatacaattaggagataattattttattcatcacaaaatttactacttttacacttagagaccagtgaacgtatgtaccattaccttttgaaagacagaatgtctcctcatattgttttcttactttctagacataacaagcaccttgccatcacactgaaaagatcataaaatatatagtgttgacttaaaaatcagtatgatatctgagactggttttaataaaaggaagaatcattgaatttgagtactgaagttgaaaactagccatatttggttataaattcctcttaaaaaattagtagtttctactttggattnttccttcnggatggatttcaccccttaatttagaagtcnaaataccttcaaatttttccctccntaaaatngttaatttgccacacagactaggggaatangggaacg

SEQ ID NO: 8 - DNA, 590 bp, Homo sapiens
  misc_feature (1)...(590): n=a,t,g or c
atatgcttgcaggttatatcttagtgcaattcagtcccaaatactttaattttgaaaagaaaaaaaaacatacatttttgaatgtaaaatacccctacagatataaacaggggcgtttcccctcttaatactttggttttcaatacagtcagtggtatagcaaagactacacatacccaacttatatttaagttgcaagcacatgctgtataagctactttttttaaacagtccccttgcaaactctaccccccttaacatcacaatagtaaacaatttagtgcatcaatcgtttaaaaaatctacagctaaacagacctaactctttcaaatttatctataacattcctttatctgtagcatacattttaactgggctaacagattataaaaactagaattaaattatatactagaaacccagagcattccacatttgacaatgaccaaaagccaaaaaatataaaataaaaataaaacaaaccaaaaataatggggcgtttcccttttaaaaaataaattttagctgcntctcggnaatanccaatttaggncccaagtggggcgccatctattaaaggnacattagg

SEQ ID NO: 9 - DNA, 496 bp, Homo sapiens
  misc_feature (1)...(496): n=a,t,g or c
tttttttttttttttccagttctttcttttttattctgcagttttctatcagtgtcgggtcccccactccagccagtggtgtggggaagggaagacatctctagggacacgactacagaccaggcagtgagcctagcaaccatacatcgaaggtgtcgccagcctcagtgccggtggncgtctgcaccaggaatagctaaagccgacgacatctagccacctcgagcgccagggaagacgctccggtanaaaccgcggcctcaggcggactcccgctccagctccgcgctgctggtggcatttccggggacccaaagtgggtggccttcgtcttgcccccgcagtggcagcacacggtccacaggtacttgagcgtccgccagagcaagatgatgaagaggccccgaagaaagtcaccatggaaggaggccaggaaagcccaccaaatgcgttngncccggntgtcgaanggaacctccatggtcancgggatgat

SEQ ID NO: 10 - DNA, 449 bp, Homo sapiens
caaaaataatgcttaaaagagacttctagaaacagtgggactacatcaggaccagaagacagtgacacaaggactgcaaatgttaagactaggagtagcttttcacatggagcttttatgtagaggacgtctccttctgttgattcctacagccgagacaagatgtgatcacaggagactccaaaatctcaaactgggcttgagtaacaccctagataaacatcaggaaccccactgaggctgaagtactgaaactgtggcccatgtgaaaaagaggtgcaagtgccaaagattcatgcagagcctgctggaacagagggtggtggcggcgggttagtccacacttacacaccagcaggtatgctggggaaagggccccccaggtggagtgcctgacatagggctcgctccagaggcgtctgactcagaagctcctgagagaggtgtca

SEQ ID NO: 11 - DNA, 367 bp, Homo sapiens
tatagactcattttcaggttattaaatgtaagagaaacagatacccctcttttttaaagtaggtaaatcattgatgatttatattaccaatttttagaagtaattttctagtaagcttgtggcatcagaaaatactagaagatttttttagttaaattagttagaacatttatgaatgaatataataaatattttttcagaataaaatatggaccctttgtgtttactaatagataaagccagatagtaattttttgtttttaaggccacaaaatatggcctttgttaaagaacactaaagttagaaatctaaagttagagcaactttttaatggctatttcctattattgtaagtgttaaaacccc

SEQ ID NO: 12 - DNA, 650 bp, Homo sapiens
  misc_feature (1)...(650): n=a,t,g or c
tttttttttttcctttaaatccctaatgttcacaagtcatcatgtggaactaaaatcacacacaaaggcaaatcatgaggaaacgttaaatatttcaaaatgcccacgaggcgtgccagaaacagtgctgtatctatagcacagaatcgttggaggccaaagctaaagcagtaggggctactgcaacttctagctctttactgctgcttttttgtttgtttgatagagggggattcaggtgagggggttcggtctctcaggaagttaggccataatttctgcaggttcagtgattaacttggatccatcccatgctgtcttgaactgttcaggaatgggaaattctctataatcaccatcctgagggataagtatgttcatttcagatgacttggcgctcacgatctcacagtctaatgcatcttcactgaggtatatgtggcaaccttctgtcttattaatggaaattgttggcactctccccattacctggatttgaatgtcctgggagttgatcacttccacnatgcccaccacattggcnaacaccagccgagtttttacagtggccattatcctcgtgccgaatttggcccgaggccaattcctatngggcggattaatcgaaccagcaactgttccggngaatg

SEQ ID NO: 13 - DNA, 490 bp, Homo sapiens
cttgttccaatcgttcctcttctttacgcttggcttctaattcttcttcctcttcttcctcctcctcctcctcttcagggttttcttttacttctatatgaactgtgtttccttctactttttctgtctcctcatcactggccatagcttcccaatcatccaatccagcatcctcagtatcttcttcttcttctggttcaacaggaggtggtgtctcttccttttctggtactccttgttccataacttctacagcagcacataattccattgattcagacacttctttactttctagctgctgtggtatttttttcctctttttatcttcataaattggcctcttctttggcaaagagtcttttgatggcacttcaacaccctgagcttgtagcagtttaagagtagcttcggctctggctctggcttctctctgggatttagttaaaagtttccctctttttcaagcgttctttcttctttctcgtgg

SEQ ID NO: 14 - DNA, 429 bp, Homo sapiens
tgggggtgactgtcctggtgaggggagcctgtttcaggacttgaacacgtgcacggctcgcaccacatactgccggcagatgggacactcactcatgcgcttgccgacttggtgcaggtaaccatgtgcccacactccagtaggacacagtcgatgacggcatccatgcagatgcgacacaggctgtcgtcttcctcatcctgcagctgcagccgctcgccataggacttttggttttcttcattctctttgtataaccggtttactttctctaccagttcccatttttcacaacagccagaatagttgacaaaattccgagccagaatttccttcagctggcgcacgcttcattccttccacatcatcaaggcttgacaagtcagacagttgaagctctcactctctccttggagagcccggggttcc

SEQ ID NO: 15 - DNA, 384 bp, Homo sapiens
taaaatttgtaactcctttttttttaatttcacaaaagttttcacaaggacaacgttatagaagaaaacccccagcagtggctaggtcatgcagaaccattaattgtcataccttggcccattctattcatccttgttgcactttagagagagaagtaagctatgtgagttttacaatgcttttaaactgtcatatttcctgttgagcactttaactggcacattcttatagttataaatgttctgagggcgtaactttataacctcctttgcaaagaatgcatgaagagctcttcatgatccaatactaggggatacatatatatagttatatatatagttatatatatataattatatagttatatatatataattatatat

SEQ ID NO: 16 - DNA, 572 bp, Homo sapiens
ttttttgacattgttctactgttttattgactcgttgcatttacaagttttgctaatgatacacagtctacacttactaataaattatactcacagtgtttttagtgatgtgactttgtttcaatattttataataaaagattataggagtaattacagacaatgatagaaaagtttgaggcatcgtgacaaaatagtgcaaaagcctaagttatccaaaagatgtagtgatcataattataaagactgtgtagtgtccctgggaaatgcttacaatgagataccaagcagtcaaaacggaatctaaccacgcacctgtacagtagttacaaaggtattacaaagcttgtctctgcatgaacacagtaaagaagtcacacatacacaaacgactacaatggtgttctggtattgcgactgtttgttttttcttctttaaatattattttgctttattgttgtaatgttatttttgtaataaataaattcagagagaacatcctactattagacaaggaaaatgccagaaatctgagatattttccctcttatggccgtattatattggttac

SEQ ID NO: 17 - DNA, 431 bp, Homo sapiens
ttttatatttaaagtaggaacattttattgtaaataaattacacctctataatgtttgttttaaaaaatattagatacatcagctggaaatcacttggttttaacaaaaaattttctctgtaatcttatttattctagcacttttcttgtcttcaaaagcaatgcaaaacttcactgtagctaagcctatgttagactcttacaaattcctaaatagtagaattagttcaatgagtaattcttataaataattctagatttactttacctacatgaataactgatttgctacatagagccacattaatgcttagtataaatcatacaacatgatgaacatgctcacgtatatttaaatataaacatatttggaccttaaaaagtaagtacatcctaggagatgatcccattccgggagttagccaatggtc

SEQ ID NO: 18 - DNA, 379 bp, Homo sapiens
attactataccatttatttgatgaattaatcaatgttcaaatggaagaggttttgacaatgtcactatgtttgatgtttatacctgccctgaatgcttgctcagaagagaaacagatttcccagtattttttataacttactttcccattgtcttcaattaatttgctattatcccaagtagacagacaacttcagtagtagccatctccctacatttttagatcactgaaaaaaatggatgagcaacccatgaaaataactagcttactgaaatgcttgtcttttaaagaaaagttgggattatttaaaaaaaaaaatggcccaggaccagttagctaggagatctgggagagagaagtcattgccttggttctgaca

SEQ ID NO: 19 - DNA, 425 bp, Homo sapiens
gtaataatccttttacataaataccaaaaatcatggcataacaactccccaaaaaggaaaggtataaaagaaatgaatgaggagaaagctaataaagaaaagtaggcaagatgtctcagattctccctggggtagatcttctcagggcgataaagaaaacgtcttcccaaaaaacccctttagacagaatctgagatggcttaaaatagctgctccagggcaaagcaatgcctgcttaaccaggaataacatactacttctaagtcctgtatagaggtgctcctgcggcagaaccagctcgtctaccatctgactaggtaccacaagagtttttgcttttttattttaaagaaaaagatctgcccatcacctatatttttatttatctcatgggattttcgtattttcctgggaatgcaggcact

SEQ ID NO: 20 - DNA, 552 bp, Homo sapiens
  misc_feature (1)...(552): n=a,t,g or c
gagacagagtctaccctgtcacccaggctggatggagtgcagtggtgtgatctcggctcactgcaagctccgcctcctgggttcacacttttctcctgcctcagcctcctgagtagctgggactacaggcgcccgcaccacgcccagctaattttttttgtagttttagtagagtcggggtttcaccgtgttaaccaggatggtctcgatctcctgcccttgtgatccgcccgcctcggcctcccaaagtgctgggattacaggcgtgagtacccacgcccggccttcttgtgtcttctttactgtgactgggtcgtttttaagaaaggttatcagctttgtgtttggtttcccacagttgataaaaatctatcaaaaacattataatttgcaaggaaaaaggtttttcaatggctgcaggaaccagaaagaaatagcatttcttatctgtataaacacaaacatttaaagctagtcacaccgcagtaaaatccaatacagtatgcaaaagttctataaaaatgaacaagagatacacgtttactttcattn

SEQ ID NO: 21 - DNA, 365 bp, Homo sapiens
tttgtgactcaaagatgagatttttatttaaaaatcattcaaaggtgaaacacagcaacagcaatataatgaagtttaaagtccctgtcctcaatgaatgtacaatgcagttgggaacaaaaacaatgattattaaagtgctagttaagtcttatttttaaagagaccctatcttgtccaggatgcagtgctgtggctattcacagacgatcatatcacactccaccctcgaactcctgggctcaagctatcctaccacctcagcctcctgagtagctgggactgtacataggcatgcaccactgcacctggctcataagacttgataatttataaaataattctacagcctcttccttactctt

SEQ ID NO: 22 - DNA, 546 bp, Homo sapiens
  misc_feature (1)...(546): n=a,t,g or c
aatctccccctattgttttgccaacagtaatttaagtttgtgtggaacatccccgtagttgaagtgtaaacaatgtataggaaggaatatatgataagatgatgcatcacatatgcattacatgtaggaccttcacaacttcatgcactcagaaacatgcatgaagaggaggagaggacggcccagggtcaccatccaggtgccttgagaacagagaatgcagaagtggcactgttgaaatttagcatgggtgtattaacaaagaagctgacagcctggaaatatttacttctgtgggtactgttggtgaccccgagcgatgaaaatgaacattctgccactttccatcccggcggtgcacacacgagtctcttctgactgcattgtctttggcattccactgccatccatgtactgtgtgagcctaatatatgctatgcaggcggcatcatcccctaccagatgtacatgagggtttagaataatagtgtggattggtttattgcttttggacanagcattttcaaagtagaatcggtgaaaatc

SEQ ID NO: 23 - DNA, 272 bp, Homo sapiens
gaaacaatttttctgaaatttatttctaaaagtcagagacaaaactttagaagtgacacatttatactaagcatacatgcgtgacgaaaaaaataagcacagaatacaaaaatgaaatagtaaaattttaatacagtattctgaatacaagtagaataccactagataagaattgtatttacctaagaaatctatgatagtgtgggtggagataaaccagtttaggatagccacttcactattcacattttaatcagtgctgaccagaagct

SEQ ID NO: 24 - DNA, 350 bp, Homo sapiens
ttaactgacaatctgttttggttttttttttattgcaaattgttttatgactataactcagccatttgtgtgtggaatacacatgcgtaggggaagactatgaaactcacttgttactcaaacacacttgtttataaatacatatatacacacacacatatacatatccacacccaacttttttttttcccaaaattcaagtcaacaatttagtggcagagagatgctataaaaacattatttttagatgccacacaagtcatgagaaccattaattttatcatacaactgaagtacagccatcttgaattctacctggattaaagttgatcattttgttaccaatgcaa

SEQ ID NO: 25 - DNA, 393 bp, Homo sapiens
gtctaacatttatttttttctttttccccagaatcctgaaacacaatagtcttttagtagaagaggtttctgagttctttctaagcaactactctaaaaaatcagtagcttctaggtggaatcatacagtttccataaatggtcttattttccttttctggttgaaatttaacccaaagaactttaaggtctaatgtgatgcagtatttacatacaaaactcttaattcatcctgcaaaatggccaatatgagcagataaataggaaagctatgcatctaataaagcacagggccagtgctctataaagattattgagttgtaaacataagatatctattcaaaagagaccactgaaatggttggggccaggttaggccaaaacttaatgcat

SEQ ID NO: 26 - DNA, 362 bp, Homo sapiens
cttgaattaagcacagactcgtcagctcggttgctttatcatgaataatgtgtgtgaccttgcagttcttccacagttcagcaaacaagtgctagcttcactgaccaaaaattaaggaaggaaaacacagtttttaaaacgatccatcttttaacagccgaaaccgatgtgtctatggtgctgcaccttgctgttgtacttctgaaatcagacgtgtgtgaacgatcatttctgacttaaccgtgagatgctcacgagtacccttcctgttgttttgttagcattgaaatcgagactatttatttggaatatatacaacagtgtttttccactgtatttcatttgcaaaagttgagaactgc

SEQ ID NO: 27 - DNA, 411 bp, Homo sapiens
attaatatgaacatatgaacctttattaagtggctcacatttcagtataaatcacactaaaaagatatttaaaagctatttacactacagtgctgacacatttaaaatgaaaaaaaaggatataaataagctctatggaaaagctttaaattgttgaaaaagaattctggctcatattacaaaatatatatatatatttatatatatatatatatgtcaatgtcagctctattctaaaacctaaaattccaacgtaaatgatttttttttaaagactcctttatgtttaaacctgcaatgtttacagtgcatctggccctaagtgcttaatacttcacagttatggacaggcactgaggaatgttacaaagctacataaactatgttttgtaacagacataggagcaagtc

SEQ ID NO: 28 - DNA, 417 bp, Homo sapiens
caggaggaaaaaaattttaataacatatgtttgcacaggagtcccacaaaatatgagactccgagaagagtcagatgatggacactcatgcaccaccgtgagctatcgaaagaatgtgggcttagggcttctgcatggaggtggccacggaagtgtgaaagtgaaggcaagaagtgtgtcctgaataaagcttggctggttttcagacaaaaggtcttctgggtaataaatgttgtctggagcagccctcaggagaagaggtaagagcctgtatgggatggtgtcgctgccaacatccttccctgtgatcccacttactcttccctggctgatgagatacttggggttgtgattcatgatgattgaatttccttttgaggatttgtctttgggcagatgaaggaggctcagagaaaa

SEQ ID NO: 29 - DNA, 268 bp, Homo sapiens
aaaagaaaaatgttaagactttattcaagatgtgtatcaggcattataacaaaacagcagaacttcaacctttggaatactgtaattttacatccctttgatgcacagtccagtatactattttattacagatcattctatagggactacagacatgaactagaggaaatgtgcacagtcaaaatccagaatatcagctctgggagtgtacactgttagaggatgaagcacatcctttgccatttcaaatactgtgccaggtggagga

SEQ ID NO: 30 - DNA, 241 bp, Homo sapiens
catgggaaaacttttcttcattctcaacatgcttaagctatttttacaaatcagttaaactatgtctacacaaagcttagaagcactttatttgggagcaatcagtatttttgtcaaaacttttggacaggtctttatttgtgttttggaaggttcaacacgaattgtgcaaaatctctggatatattagtttagcgatatggttgttgaagaaaataatatgttttaagcattcacaacg

SEQ ID NO: 31 - DNA, 361 bp, Homo sapiens
ctcccaaaataggaaattttgtattcctatagtcaaaacaataaacaatttttgaaattaaaaaagttgagaatcttgaaattcatttttttcagtagaataaaacaataagcagcatgaaaacgtaaagtgctacataaaagccccacattacataaattttgaaaagtttattggcttaaacagttacaggtgaaacagattacgtattttttttcaagcatgctattttaattaccttgatatctcatcatgtgctatgttggtcaaataaaatgtcatgagttatctagatctgaggattaaagaggagtcctcagcctttacttgccagaatatacatccagttttagctgtatgc

SEQ ID NO: 32 - DNA, 363 bp, Homo sapiens
tttttaattgcaactggacttttattgtgcagttacaacaacaaatgttttcagaaaaatatttggaaaaaatataccacttcatagctaagtcttacagagaagaggatttgctaataaaacttaagttttgaaaattaagatgcaggtagtgcttctgaactaatgcccacagctccaaggaagacatgtcctatttagttattcaaatacaagttgagggcattgtgattaagcaaacaatatatttgttagaactttgtttttaaattactgttccttgacattacttataaagagtctctaactttcgatttctaaaactatgtaatacaaaagtatagtttccccatttgataaaag

SEQ ID NO: 33 - DNA, 320 bp, Homo sapiens
atgttgtgaaaaggaatctgtaaaagtcagttttatcacaaattgtaaatattattgaaattgattgcaaatttagatcacatacaaatgagagtctgacattcaactgttttcctatattccaaagtaaacaattcctttcaacactcaagacttaaacaggtattcttagagggttatatgaattgctatcagaagctgttggctaacaagccagtaatttggttctttcaccagaacacagttccagataagcatctttgcactatttctcaagtatgaatccccatgtggggggaaaacggatatactttcaatag

SEQ ID NO: 34 - DNA, 299 bp, Homo sapiens
  misc_feature (1)...(299): n=a,t,g or c
aatagttccattcattaagtcatttcttcttgctctgcttggtaaaaggtgaaaacatggcatcaaaacacagcccagagaaagtcaattcctgtatttctaagacagtaggatccaggcttatttggaagataaaatatctctggaagaacagatagtgttaatggattgantcattttcctcaaaaagatataacccccagaacctcagaacgtgaccttatttggaaatagagtcataacatatgtaattagttaaaattagtccatattggagtagggtggacactaatccagca

SEQ ID NO: 35 - DNA, 515 bp, Homo sapiens
tttttgcataatgagcgcattttattaaatagatagttaacgcactgcttcttactcattccaagttgctgtaggtgctgcccgcattaacagcagggacaaaagcttcctatgcgcgtttcagcaggaatactctctccactccaggtacttctttgttttggatttttttggcatgatttccttcccatgtaaagaaagccaacttcttcaagacacaggtcattcagctttagtggtggcctccaggttctccttgggccgtgcagaaggccaggtcccgcacagtgaggccctcctttgtcctccactgaaagcttttcactgttcggtctgcaaagaaagaggttcgcctgcccctgctccactcgccagggtggaagtggtggagggctgggaaagggctttcttcacagggcagtgctctcggtatcattgtctatatccagcaggatgcggccaggcacgtctttgctggctgagtctgagtgcatttcaggaaagatgctgcgatg

SEQ ID NO: 36 - DNA, 350 bp, Homo sapiens
ttttgaacttgctcagaattttattgggattaacagggtccacggggagaggcgagccttctgggggacggggacagaataccgcaaagaataccgcaatgggaacggccttgcatagacaccgaggcgggctagcggcgcggcgggaagaggagagggatggagaaagaacttgggagaggaaggtggcagcagcgcctccatgggcactgcgcggctgtgacgaaggccacagcggccctccccgcttcggggtacagggtgtccactccacacagcacagggagaggggctggggcacaactgactgggagaagtgggtagaggggccctgaccaaggcatcacaat

SEQ ID NO: 37 - DNA, 344 bp, Homo sapiens
tttttttttttttttttttaaattttattataaagacctttattaggagaaaggacatattttctatttcttacttttattttgtgccttgaaggacttgtgaatgtatagaataattattttttcttactgcttcctctttgcaacccaacctccaccaagtcaatcgtgaaggtaggaagaaagctgtatttctgttacttttaaaaatgataacgagaagaaattaaaacaatggcttaagagaaagaggatgtaaggagtacaaagcaaaacttaacaaagagttagtaaaggaacttgcattgacaattcactcagccatgttaattttatcattaata

SEQ ID NO: 38 - DNA, 543 bp, Homo sapiens
tttttttttttcatgtttcatagttttattgagtctttttcagttttaactgtccatggtaagtacagttctagtgaccacaattatgaagctctgctcgtactaaaaatagcagatacaaagttggctgccatgccttacacacactaagacacacacacacacacacacacacacacacacacaaggttttgcatactcttacatgcaaacagtactatgctattataggaaatgtactttccttttattaaaaatacaattacacacaattagtctgggttttgttaagctaccactgatttagataaacctgagaaagctcaaaatatcaagtaacactgtttccatactgctcattcaatggcactatcactcaaaaagaaatctagttcaatcatctatattaaaatcacagataatataaaaataaacattttttgcaatagcactaaaacatactataattcaaattcacaaattttgatatgtaacatatattcaccttcatattaatttgtgattatgtgtataataccatgt

SEQ ID NO: 39 - DNA, 186 bp, Homo sapiens
tttgtgaataaataaaagtttatcattccgtacaaacgcactcattttccacaacagtttttacacgagccgcggtggcctggtggtggcacgtggggggcggccccgcggcggcgtcacagcggctccaggtcctcgtccccgcacgcatactcgtacaggtccacggcgcccagcggtgagggc

SEQ ID NO: 40 - DNA, 413 bp, Homo sapiens
tttggaaaatgacaggtttttattgctatgtttgcagtggctttttagcacagtaagaatgtccccgcaggcccaccaccctcacgcagccccagccctccagcctctgtccgggtgtcagggaagcctttcttggggtcactcagccgtctcgggactggacgtgacagacatacgtgggttaaagccgctacacagaagactggaggtgcaggaagtgcatccgccttgagcctggatgtgggagccgtgtccggggtcccttcctggggctgtgcacgcccagggcacagggtgggaagcctgagcaggccaggttagcagcccagacacccaggatggaatattgcagcctcttgccccacagacacccaagctcacacaattgatattggtggtgattggcgcaggaa

SEQ ID NO: 41 - DNA, 365 bp, Homo sapiens
ttttgagagaaaaggaaaaactttagttaaaatctttacaataaaataattatgactataaatctctttagttaaatatgtacacattacatggtatttgtataaagaatggaaatggataaagtttttcaggcaaatctaatgcacaaatacaccatcttttagagtataatgtcagtttatcattcgttaacagctgtgttagacagtggctctgctttgtgcaaaacgtgataaacaaaattaggaaaaattctgcaaaattatttagttccccaaggaaattactaaaatagaaaatggcaaaagaaaaaaaggttgcacactgaagcttgattgtatactcaggctacaatgaccagcac

SEQ ID NO: 42 - DNA, 489 bp, Homo sapiens
tgaattgtttacaaatgtttattaaatgtcagtaatttttacaaagcaaatattaatagcaagaggcaaatgttttgcaaaatatgtacaaaagtaaaaagctgtaatgaactagcaactcattttataaaatcaaaccattctttccacttttagacctcctttagaaataatttattgcccatcctgaactaaagcactgacaaaaaaatttacaacaattatcagataatgtgcttagttcctggaaagttataaaaagatatatgtaaaaaaaaaatcctaagccacaaatattttatagagctaatacgagtcatgttttgttaggtacagtatctacggggttattacaaaatatacttttttataaggcttcttgtggtaaatgagctctcaccagagtagagtagtttagaaaagccatttcaaacgttttgcgattctgccttcaagtaagaggtaaaaggtaaatggcatagtttgttg

SEQ ID NO: 43 - DNA, 321 bp, Homo sapiens
ttgaaagccgttatgtccttttatttggtgtgatagatgactgggtatctctctaactctatttgctgacttcagcaaagaatcaatgatgagcttagtttgcaagaaccggttccatcacatggaacgggaacgtatgttaagctctagcagccaccttctgtcaaaactgtttgtaaagcaattaccataatcaggttatgaggtcccttggttgggggaaaaagtattatcaagacttggcacagcacatgaaaagcaacatgttaagtttctaggttttaagcaaacatctgactatgctattttcaactacatcat

SEQ ID NO: 44 - DNA, 363 bp, Homo sapiens
tttgcacaagtctatggctttactacttttcaagacaaaagtcacatattaaaatacaaactactcaaaagcaaatagttgtcaagaatgtggtttacaagacagatcttacagataatacagactatattatgatttatctgtttgaaaacagaaagtagtgtattatactgaattctggtataaggtgcgcaggaaactttacttacaatcctttattttcataaggtaaacaccaaagtatttctcacatatattaccaccagattttttttaaaccaaattccggtttaaaaatcacacactgacaacacagaaatacgaaatgctaggaaaagtctagcatatgaaggaaaaacatgt

SEQ ID NO: 45 - DNA, 412 bp, Homo sapiens
ttttttttctataaaaatataactctttattaaataacatgcacaaatatcaactagtcattaaacagatatttagaacaaattgtaaagaaatacaaatccttaggtacaatttagtatcttgttcatgatatttgaagagtttaaaaagaatcactgattaaactaaccatcctttttctttctgaatccaaaaccttttcaggcatatactccattccaaatttttttctagcatttcagagcttcagaatatctttaataccaaaagcccttaactacttatttgattatacatttccaatgagaaggcattaacttttcttttaagctatcattagctttgagtctctttataaaagaaatttgtagaagcataatcatggcagagaggctccagctttttgaggta

SEQ ID NO: 46 - DNA, 421 bp, Homo sapiens
aagtttcttggaaatttttttattctccttgccaacatttcttttgacattttattacttaattatgtgacattaagaaataatttggttgcatattattttcaaaaagcagtaagaaagtagctattgagaaagaaggagggccataggtttttcaataaaacgttagaaacattataaaaaacgagactcccattacatggaaacacatgatcaaagatcagactaacacacattcaaacaggcttggttcgaaatagagttctccatttctttcagatgagccttttttcttaggctctttcagaagcacttcacaatgaacagaggtcttgccagctcatttcattagcggagaagcaaaggtatgatggcagaatcatgagaagatggaaataaggcctgaggatatggcttgatc

SEQ ID NO: 47 - DNA, 324 bp, Homo sapiens
ttgtcaatgttagaaacatttacttctgacgataatccatatagctttctctgatgttacacagcgattacatctccttgtgtctaaattaaagtcaaagtatgaattttaagatgatttttaattatttaacaagtagaaatacgatcagtgacaattatcaattaaaacattaaacaacccagttaccttttcttaacagtcatgatgaaatatccctttcctgtcttatcagaagccttaattattctctaccacacacaccacaaaagcttcttaatagagcatcagtgtccatcacacctttgtgtagaatctctggca

SEQ ID NO: 48 - DNA, 502 bp, Homo sapiens
ttttggaaaatgagatttttgactttaacaaaacaaatacagattgaatttaccaaatattgataattcatgtagaacgggtgccacagattttaaagtatcaaaaccaagagggcatcacaaaataaactttggtgaaaaatatcttcatcaaagaagaaaatatgagaagagtagtccttatgcagtgaggagaaatatatttggtaaagtaaatatgggtagtagatactgaatctatagatagcatatattccaaatgttttttagggaatatcaaatcagatgatgcttagatgttatagtaatatcacttatctcatttggaatgaaatttaatgttttttaataaatagcaaattttcattttttcactacctttataaaacaaattaaatatttagagtataactgatcataactaacatcaccttgcatttactaataaatactctaaatacatttggtttattattggaatttatatccttataattttacc

SEQ ID NO: 49 - DNA, 398 bp, Homo sapiens
gagaaacactatttatttatttatttatttattttgagacagtcttgctcttattgcccaggctagagtgcagtatttacaaattacacacacataaaatctggatttctagcttcttatgacaaaggatctggcaacaccgggcccacattcagccccacaggccacaggtgacttgacttgcctccagttcacccctgcccctgccagctttgtctcctgacaccgaaacagcccgtcagagctgtcactcgggttcatgcgtgttacctgtctggccctggaaaggccctggagttggtggcgccactccaggtcaacaggcatgtttagaaggagcctgccaggggctgcatggccgaggagccacctctccctgcagaggaaagggatcctgc

SEQ ID NO: 50 - DNA, 424 bp, Homo sapiens
tttgaaggtatatattgtttattatttttacatcgtctcttccctactgcatcaagccccatcatcctagcatgcacccaggaaatcagcaaaaacccatttaagagtccagacttcaagggtccctcacagtaatgggcatctcttgttttgcccgagcagagcagaccactcgtttccccttattctgctaattgtatttcattttcctttaagcaaccacctttcaccccatcctgaatcctcagaccttatttccctggctctaggaattagcacatgacacaggcctggccactcagagtgtttcattcccctagaagtagagatgagaccccaaacgggtcaatgacactctccacttggaattattggaataagtaaatctcttcccactgggttactgggttagcaggatagaagc

SEQ ID NO: 51 - DNA, 424 bp, Homo sapiens
ctttttattgattttttttcaaaagcactctatatatggagtggcaccagatttaacctatttaaaataaaagtcatacaaacacaaaatatatttctgtgtcatgccagctcattatataataaacatgttatgacagctaattctactagaattactgtgaatacttacagtacactgaattttattctttcacatccattttagttttaaagagaggttcacgagttaaatgacaatggcatggctatcttgaatggggtgcaaacatcattggggaatgtggatccaattaatccgaaggtccggtgtgacccgtattagttttatagacaagagaagggtttaagatagggtgaaatgagctatcagtggtttcaatgtctcatgaaagaaagaaatgcattaaaaaaaaaaaagtttg

SEQ ID NO: 52 - DNA, 452 bp, Homo sapiens
tttggtgaataaactaacagctttattaatgaaggcaaacatcagatcattgtatgaatattatatatatatataaaaagaaatccaaactaacagcattgtatttcaaaagtactgtacttctgtttcttttaaagagacttgtcatctgtttttataaaacaaaatgggtactcttctcctaaaaaatcctggaaaaatgaaatagtcaatttcaagctgatgaattgaacacacctttctttaaatgcagactattgctaggaagcaaataaagtcaagcatcagaaagaagatgtatgagaaatgcatgaaagtcagagaaaagggatgtagtgaaattactgctaatctttcccccctatattcaaagaccatccaaaactggtctttcatacaaatataaaataactataaagagagggaatttgaaaccatacccatctgaaatc

SEQ ID NO: 53 - DNA, 497 bp, Homo sapiens
tttttttcagtattttccttcactttaatttttattgcttctccagttcagataattcagcgcttcctctttcttcttcctcaccttgttcatggctggctgttccatcagcagaacttccagcgattgccacattcattgcataagacaaaggtagtcatgggctcatcagcactgcgtgtctgcacctggttataggtgcagttcttcttcttgcatttgctgcactggaagaggtcagtggtggtgccgccagtcttggccatctggtgctcacggatggcctcctgggtcatggcattcctcaactccctcagttcatcactggccatttcctctgccgtcatcttggctataagcctgcggagatggccccactgagcacgttccgccgcacgcggggttcctggggtccttgaggttgcttatgcggctgcgcacgcggttccggtacttcatgtccgtgctcttgagctcttggtagatatgatcttcga

SEQ ID NO: 54 - DNA, 423 bp, Homo sapiens
ttttgtcgagaggaacgcacgttttattggaagtcttggcggcagggggagtctgcgggggcagggctggggaaggggcggcggagggggcggtgggcgcgcaggtggagcgtgggagatgtcaggtgccaggggagtcctggccggattccatcgctccaggtgtttctaccgcctgcggtcggacagacggcggatggagctgcggaaagttccctcctcttcatcgggttccccagtcctctgctgctggttgaacttgcaccggcatcttctgctcagcacgatgaggatgcccaggatgaagaggatcccggcgatgacgaggcctccgatctgcagggactggtagtcgtaagtgaacgggtcgtgttcctttggactttctgccttggccatggtgaggagacccacacagaaaac

SEQ ID NO: 55 - DNA, 400 bp, Homo sapiens
tttttgagacggactcactctgtcaccaggctggagtgcagtggccattctcggcttactgcaatctctgcctcccgggttcaagcgattctcctgcctcagcctcctgagcagctgggattacaggtgcccaccacgcccggctttttgtatttttagtagagacggggttttgccatgttggccaggctggtctgcaactcctagcctcaggtgatctgcctgcctcagcctcccaaagtgctgggattacaggcgtgacgaccacgcccagccacgttctgagttttgaggatccagaaacaaaaggctggaaagcgacacttctacaggtttactgatgagtccggagaaaatccaaaaacaaagccccactgagggtttgtgaatttggctgttc

SEQ ID NO: 56 - DNA, 288 bp, Homo sapiens
tttgacatctctatatttttattgaaaataaaaaagtcatggtgctttcttcctcataagtggcatatggacacccccagtgctgccggtctcgcttccggtacaaaagtctcagcaggaaaccaaccttaatggcttgttggtggataagacggcatcaacttgtacatttgcccattgagagaactcccaggagcaactgtcctctctccagtacacgcggcacgttgctaagaaggcagatttcaggatattcacattcatgcattacgtatctcacactacctg

SEQ ID NO: 57 - DNA, 299 bp, Homo sapiens
tttggggaacattctaaagcctttatttagcatcaggtagattatttcattataacacttgttaacttcaagacagcaattaaaatcacggactggcagctacctaggcccctgggagcagtatctcagtctggggtttgggtggataaatactataagatttaagatgaatgtgccccaattaaaggggcaaaactactgtacagtaggtctccacacatattttaagtacacaggtactttgcaaacttgaaatgcacaaggcctccttttatatagtttgatacttacatgagtgc

SEQ ID NO: 58 - DNA, 407 bp, Homo sapiens
tctagttctttgtctaggccttcaatatttaaacaaaatgcaaaactgaacgttacctcaaaatgaaacagtgtgcgtactggctgttagaagttgatggcggtctactgtttgatattcactgccatcttcctctgccccactctacctcaactcgggaccgcctcacctaatggtgggctttgcgctttatgccatgtagagaagacactgggtaaccacagcaaatcaacacgagatcctgtactgcctactctgggaatataaatggctctgaggccaggggataaaaccaaaagatctaggagtagctgaatgccaagagacgagttagaacaagttttagttccaaagatgattagactggaaagaaaactgatccaaggagggtcatttctgtgtagatc

SEQ ID NO: 59 - DNA, 440 bp, Homo sapiens
aaataatacaactagtaatttcttaagatcataaattccattacagtaaccctggtaggcaactctataaagttctgggctccaagaagaggtcagtgcatgccataaatgtgtttgatctgctgtgaagtatattcagtcttcaaaatgtaatgcttacatgagataaaatcggttggttaccacccccaaattagcatatgccagcctgcacaaaggtaaatagcaaaaactttaactgctcaatctgaattaaccaaagattccttctaggaatcttaaaaaaaaataagggtacgaacactccaagcacttattttcagatgcatcaactgacataaattaaaaatggtacaaactaataattgaacaccagtagcgtaacaaaatagaattttcactctttctgctttcagtcaaagtggtttgctcatgtttgc

SEQ ID NO: 60 - DNA, 436 bp, Homo sapiens
ttgagtatgttatacatccaagagccttatatttcactccacataaacagtaaacataaaagaaaaaagaaacactttgtctccctatagagcattttatagtataggaagggattcaaattctctttttaacaaaattcttgtttctatatagaggagattttatattcttaatgtttacaacaaagcctatttccaccaaaaaagcaagaagaaattaataaatgaaatcctgaactctaaaaacctaagaaataaaactgtgaacaattctgaaacggagtgttttttctaaaggctaatacaaacataccaaaatagaatttctgagcacgaactatgtgatttcatttcaatcgtatcactttcatctgattgaaataatttagaaacaataaggatgatcttaatctcactattttctgcatgagactat

SEQ ID NO: 61 - DNA, 438 bp, Homo sapiens
tttttgccacgcaattctgaataaagtttattaaataatatgtacagcaaatgtagtaattcaacacatctatttatcaaatcaatccactgcaatgaagaaaaataaatgaacagaaaaatctatgtctgcataggacatgctctcagtgtgtaatttaaatggcaatactttaaattaattggttatatataatgtcagttatttttctttcagaatataaccttttttgtagtaacctattctagcaataggacttaatacgactgcagataaataggactgcaaaaaccaaaaacccaaaataatgaaattaaaaaggaaaaaaaaactgtaactgagatcagagttacctttcctccccaatagaatacttatcgtaaattttaacactttacaatggctatttttgtgctaaaaatctgtaggtgagttatt

SEQ ID NO: 62 - DNA, 387 bp, Homo sapiens
tttttttttttttttttttttttcattatttattttatttcctgattctttcccctgccaagtgaccctctgggaaagcgggagtttttgttttgctttctaccagggctgcaagagcctagaactgggtctggcatacagcaaaggctcatttattgctgaatgaatgcatagtttggggaaggggaggacaagctgaggccacatttgggacgggtgctggggtggggtggagaagggagctgctgcccagaggacttcagtaagattcagggtgggggccaagaccagcagctggcagcaggttctgagaggggctgggcctgcctgaacagggaaggggtccagcagccgtggtcaccttgctgggactggtgtgtggggcca

SEQ ID NO: 63 - DNA, 183 bp, Homo sapiens
ttagtgtttttaaaaacattttttaatgaagaaattattccactccaaaatatagacacacaattaaatagtttaatcacttcaaaatataacatgtccccaggaggttccaacacacacacacacacacacacacaaaacaatacttaacagcaatacaaaaatccatacaatagtattttt

SEQ ID NO: 64 - DNA, 270 bp, Homo sapiens
tacagggcaacccacccctaggcaaagcctcggcctctcccacctcccccacgtcatcactgagctgcggcacgcagaggtgccagccaattccgaggagaattgggtccaatagaaatatttacaaataaccagggggcaggtgtgccgtgatcgggaatcgtgagggaactgagtaccagggggcccttggctcccaacagccccaggccctggggcggacttggcacaggacccaagagggaactggggcattggggggccggcaga

SEQ ID NO: 65 - DNA, 390 bp, Homo sapiens
aaagtacacatatttattttaaaacatttgtcatatttgctaataaattgataaggaacaaagaacgcctgaatctacttaaaagaaccttaatctcaaatgaagtaaaatatataaacaatcagcaaaattcttattaacttgtagaaatgtaatttatttcatgcaaagctacattctttcctatattttaacagctaatcaaataaacatttcaaaaaattcattacatcacaataagttaaaatactacaaaggaactgcaagtcaatcaatttatcaaaaccaaactgagcgaacactatgcatagataaggccaaagttactaatttgcttataggtagcactttgcagctttttccaagtacatatttgaaaatgtagtgaga

SEQ ID NO: 66 - DNA, 269 bp, Homo sapiens
ttttttttttaaaagtataattttgcattttattcattcattccatcagctgggaattgctctattgtacaaatacagttttgtacaaaaaaatcacaaaatgttacgaaataaaaaaagtacaaactgcattacttaataaatatgactaaaagtagttaaagtggcaatgagattgattttaagttggaaacattgtttgacccagcaaaccatacaagctctgtttacagacatttctacatcaatacagggcaatcctattttgc

SEQ ID NO: 67 - DNA, 473 bp, Homo sapiens
tttttttttaccagtttatatagggacagaacacacacagaactaagccttctggattatgttaaccaccaatattatagctcaccttcatcaaagtacagacaccagatagggaaaagtggatgagaagggaggggaagggcaggcagaggcagcagggttatgtcattgatctaaacaaagttttctaaaccagattgtgccatcaatcaaaatggtcaaaccgatttagactttcaacatctccagtaggaagtgagcccataattatatacattactctgcaaaatgctattggatttttctttgctccatccaaactctatgtaatcaggtgcacctcaggctatagtttaaggattatgggaccaaaatcttcatatgttcaacgattctgagtacaaacagaagttggggacaaacactgtggaaaacagctgcattccttttctgcagtatatacaccaggtatt

SEQ ID NO: 68 - DNA, 363 bp, Homo sapiens
ttttttttttttttttttttttttttttttttttttaagacttaacgtcattgtatttattaggttctgaaacaatacacattcacatccttttgaatacagtacatttggcacaataagcgcttgctttacaatgaaataacactaatgaatggcaagagattaaaattacatccagaaaggaaaaaaatgtacaaataaagcatcacaatacaaaaaaaaaaaaatcctaaaattgaatacattttacagttagccagaattattttgcacataatttaaaaagaggtaattttttagccttcttttttttttttaaagcaagaatgcattgttttttcacctttggaggaaaaaaaatta

SEQ ID NO: 69 - DNA, 97 bp, Homo sapiens
gagacccctccctgcccaccctcccacaaaaaaatttacagcgctacagttataacacgtgatgttcacatctgaaaccattaacctttcaacacat

SEQ ID NO: 70 - DNA, 326 bp, Homo sapiens
tttttttttttttttttttttttttttttttttttttggttttcttcagccgcagtcttgtctgctctgaagaaaattcttgcactgctcagtgagaaatacagcaattcaaattcctgtagatagacatccagtcgcttctgagtgagattcatggtttgtaagagtttttcatcttgactggctgactgtacattctgttgcttagcaacatgctcttatctccttcaggtatttctctctaacagactggaaccagtgaagtgaatcaaactcccgatactgatccaaaagctttagaatgtaagccacacccatggcaaagc

SEQ ID NO: 71 - DNA, 440 bp, Homo sapiens
tttttttttctagaccactgagaaaatctttatttacaataaatttcaataaaatttgcataaatatattcccaatgtacaattttcacctctgatttcttcatatcatttaaaaagttagtctgtcctgttctccttattcctttcagacaccagtgtggcgctgacattggcaggtggaggggagctgccagggagctggggggtggctgagggctcaggctgcttggggtggacctctctctgggccgccacgtttcagctccatccctgccctccagtttcctctccatggtcgccaccaggatcttgagccacgtgttctcggtaaggaggttttctgaggcatcggccagctcctgcagcttgcgggccagctcctgcagctcacgtgtcttctgctcatagagggcctgcagctgctcactgtgtgcgtggag

SEQ ID NO: 72 - DNA, 244 bp, Homo sapiens
tttttttttgctgtgttcacatgaccttactggtcagatgtttaatggtcactaataatacatttaaaataagcatgaagctaactgcatgatcatatggtgagcttatccgccacatatgaaggcaaattataagtaaaaatgtaagcaaacaattttgtattaataataaatagagctttaagcatttaacattatcaatacttttaaaatttaaataaatgcactattttatacagaactg

SEQ ID NO: 73 - DNA, 369 bp, Homo sapiens
tttttttttttttttaattagattgcattttatttagataaatgaaaatttgccccaaacagaactaggaatcaaatattgtcttggactagaggtaattgctaagctggaagcttatattgaaaactaaaatttccagcccttgactatctgtagttccaaacatcaaaggaaaatattggaacaatttatctatgtacagagagaggcaactcatgggtaccataagcaaaataacctgagggggaacatttgatattacaagaagtggtgagagtttacaagtcttgcattgctttctattgtacatggctctgtagtaatgccaaaaataacaaaatgtaggcacttgctctggacttctgcagt

SEQ ID NO: 74 - DNA, 437 bp, Homo sapiens
tttttttttagtgctcacaagtttatatttttaggtttgaataaagattcttgtgtattttctaaatacacagacaaaacagttccggaagtttacatacatgtcttaggacacttatattaggtaggtaatttacattttaaaaagttggtcttcgtaaaagatcttcccaaagagcttttacaaacagcaggcggaagtgttcttttgtttacagtgttcaaaatgccaatgctcccactaaataatggcctcaaccatctctcctcaacccaaaatattgttctcaatagctagtgtactccaaatttaagtacccaatgtcataaaatttagggctagaaaacatcttttgaagtgtgcttatccctaacacattttaaactatctagaattctttaacttcagttgaaagcagagatacagcaggaaaaaaa

SEQ ID NO: 75 - DNA, 394 bp, Homo sapiens
ttttttttgcaaattcccttctttccctttaatgaggagggggctggtggagaggcggaggaccagggaatgcagccatcgggagggttgggtttggtgtggggcatctctcacagaggctgttggagcccggctcacgtcccacatgtcccttctcggaccagtgtccagggctgagtcacgggtatcgtcattctcagacctccactgagccctgctgcctcaggtgttgctgaaggagctggatgtggtgcagcagcttcttctggtggccagccagggtgatgcccagggcaggcaggtcttctaggctgagctgagccacatcactgaaggtacagaggccaaacttggagaagttgtcctggtagcactccagtccaatggctgaaag

SEQ ID NO: 76 - DNA, 395 bp, Homo sapiens
tttaaagcatagcatatatatttattttataaaatagaaaaaaaattaaagtatattgattgttctttacacattttgattacactgaatttgttaatttaatattagttcaaataaacattgttatttaaaaaatgctgagtacacgattaagctgaattttgttttccatcagaaaaagaacttcaggagtatataatggtctacaggtgcttcccatccaaaacactaggtcttcatcttttgtttcttagaccactcaggtgcttcttttttagtaaagagtgttggtttaggtgtaaatatattgtcttcatgctctttaggcacattcaaagtctttgatttctgattttctgtcacatgttttggttctgttttagtgagaagtaagc

SEQ ID NO: 77 - DNA, 324 bp, Homo sapiens
tttattttaggctcaaggaaacttccctgctagtccaacttcactctcaacaccactcaatgatctaacagcttcctaaatccaacttcattctttttgcagtttaagcccactttcaaataaggcatcactgggatggataaagaaaacactgagatgggggatagaaacattaaaaagcagaaaaactaagcaaaatctaaatcctgtcaattggatgtttaccatttcacactgaaatctttccctgaatagaccagggacatcactgcctcctgctcagatctcaaagcttcaacatgctccacaaagcacctccctaag

SEQ ID NO: 78 - DNA, 6824 bp, Homo sapiens
cttgtgctaacaatttatgaagcaaaaggcttagaatttgatgatgtcctcctttacaacttttttactgattctgagggatgcccaagttggagcaagctctaaggagagccttacagatgaagccaaggttagcaatgtccaccctgtgatgacagaactgggtaaggtcagttcatagatagagacaattccaggaagacaaatgaggcttggttcctgccctctggatcaggtaatgtgggggacaagaacagcttccttgcatgagagacccctctagcatggcttcactaccactgcttgcagctcatgcagatgatggcagccaaagagtccccacattgacccccagtgacctctgtattggtccactgctttcacttggctcctgagtccttgtgggtttttctccccaagcttagttcattatgggtagagctaccaactcacagccgttgtcctgggttttctagccactgttttctctttcccactatcttttggtggagactcaagctggctgctgactgtactgtggggtcttctctggggacttagctggctgtgtcccagtccttgttgcagacttcctttgcacatgatgcatgcttgaaggggctatgttatacccaagtcaagagcactgttggctttaacactttaaaaatctgccccagaactgaccctttagatagagtccttcctttttttcttatcattttttaaatgttattttgccttaatagcacaactattacaatattgatataggtgctttgcagtttacagagtactttttgaagtcattgtctcactccaccaaccctctgaggttatatgtatttttattactctcattctattttttaaaatttatttttatttttatagagatatggtcttgctgtgttgcccaggctggtctcaaactcctggccttaagtaatcttcctgccttggcctcccgaagtgctgagattataagcatgagccacctttatctgtagataaagcagaaggtcactgagattagtacatttctcatagtcgtaatgtagatggcagagcctggagatgaactcagatgctttgagttctaaatctctttccattttccttccttttaaagcctcgcatgcgaattgaattccagaaccttccacaattagtgtatcattgctgttccttatgtacattcctttcctgttaaattttgctaataaaatcagatgcacactcattaaccctggaaccatttttacctctgaggactaacttttttttctaatgatacatccatcggtcatggttggactgaggctctcctaaaagaggaagggcttataaggaatggaagatcatttcctcattcacacctacctcaactgactccagagaggaaaaccggccattggttgaagtacccctggacaaaccaggctcttctcagggtcgatctctcatggtgaatccagaaatgtacaagctcctcaacggagagctgaagcagctgtacaccgccatcacacgggctcgggtcaacctctggatctttgatgaaaaccgagagaaacgggctcccgcattcaaatatttcattagaagagattttgtccaagttgtaaagacagatgaaaataaagactttgatgatagcatgttcgttaagacctcaactcctgcggagtggattgcacagggagattactacgccaagcaccagtgctggaaggttgcagccaagtgttaccagaaaggaggtgcatttgagaaggagaagttggccctggcccatgacactgccctgagcatgaaatccaagaaagtcagccccaaggaaaagcagttggaatatttggaattggctaagacctatttggagtgcaaagagccaacactgtcccttaagtgtctgagctatgccaaggagttccagctctctgcccagctgtgcgagaggctgggaaagataagagatgctgcctatttctataagcgaagccagtgctacaaagacgctttcagatgctttgagcagattcaggaatttgatctagcactcaaaatgtactgccaagaggagctttttgaagaagctgctattgcagtggaaaagtatgaagaaatgctaaagactaagacccttcccatttccaagctctcctattctgccagtcagttttacttggaagctgcagcaaagtatctgagtgcaaataagatgaaggaaatgatggctgtcctctcaaagctagacatagaagaccagctggtgttcttgaagtctcggaaacgcttagcagaagctgcagacctgctgaacagggaaggtaggagagaagaggctgccctgctgatgaagcaacatggctgcctcctggaggctgccaggctcactgccgacaaggacttccaggcctcatgtctgctgggggccgcccgcctcaatgtggccagggattccgacatagaacacaccaaggacattctgagagaagcacttgatatctgctatcaaactggccagttgtctggcattgcggaggcccacttcctgcaaggggtaatcctgagagactttcagaagctcagggatgccttcttcaagtttgacacgctcaaccactcagctggagtggtggaagcactctacgaagcagccagccagtgtgaggccgagcctgagaagattctgggcctggctccagggggcttggaaatcctcctcagtctggtcagggctctcaaaagagtgaccaacaatgctgagaaggaaatggtcaaatcttgctttgagttttttgggatttcccaggtggatgccaagtattgccagatagctcagaatgaccctgggcccatattaagaataatttttgacctggatttgaacttgagagagaaaaaaacaaaagatcattttttgataatgactgaccaagtgaaattagccctaaacaaacaccttttgggcaggctgtgtcagatcacacggagcctgcttgggaagacctaccgaggagtctgcatgaggtttattgtaggcttaaaatgtgaggatgaaaactgtgaacattttcacaggcctctgcggcgttgtgaagccaagtgtttagttcagtcgaaaatgaacttggtggcaatcaacgggttgcttttggaagccaaaaaagtattccctaaaatcttagcagaagaacttaaagaaattgattatattttgtctacagatatgtatggcctttgcaagtccattctggatgtccttttccctaagcatttccatcagagagtgttgtcagaaaaccccatggcatgcaaagaaatcctcaaaccaaattacaaatccttccggttctacagatttgctttgaaggagtacatccactttctgtttgaaaatgaaagcgcacgcaaccgccgggaatccacagacctgtggctgagtgccatgcaagctttccttctctcttccaactacccggaggagtttgaaaagctgctccaccaggaggaggacaactacaacagggaactcaaagctctagagtctgaaaaggatgaaaggggcagggggagaggcagcaggataaaaggaatagaagggaaatttggcatgctggcacccaacagggatgatgaaaatatggacaagacccacctgtgcttcatccggcttctggagaattgcattgatcaattctacgtgtacaggaacccagaagactacaagaggctctttttccgtttcatgaatgtcctcatcaagaggtgcaaagaaccactcatccccagcattggaaacacagtagccctcctggagttccagttcatccactgtggggtggtgctggcccgcctctggaagaatgtcattctatgcctccccaagagctacattgcactcttgcactactgggagttcctgtttagcaagaaggacaaggagcttggggatgtgttctccatcattcaggaatacaaacccaaggacgtgacaagagccattcaggatttccggttccatctctcctacctcgccaaggtgctatgtggctatgagaatgtgaacttcaacgtcctgcttgatgccttcagtgaaatagactatgtggtctcgggtgaggctgagcggacactggtgctgtgcttggtgatgctagtgaatgctgaggagatcctgcagccatactgcaagcctctcctgtatcgccacttccgggagattgagtcaaggctgcagctcatgagcatggactgccctggccaggttcccgagaggctcctgaaggtggtgaagcgggtcttggtggcagtcaatgtgaagtctgtggctgaggcactgcaggacctgctctttgagcgggatgaagagtacctaatggactgtgactggcggtgggaccctgtgcacaccaaagggtccatagtccgtggcctctattatgaggaggtcagactaaaccgcctgctctgtttggaccctgtggactactttgctgaacctgagtgtgagtttggccaggatgagatggatgaactggcattagaagaccgagaccacgtcctggccaccattctttcccaaaagcaacggaaggcctccatacagcggaagttgaggagggcatgcctggtggtgtctctgtgcatcagttggaggagaagagtgggcacccagatggagcgtgtcagggaggaggccagggagcccagggctgggaacttcaaaaaggcagacgtggacaggacccagtgtgacctatgtggagtgaagtttacccgtggcccagagaactatttcagccccagcaaagcgtttgagggggcagcttccgaggtggcagtcctttccagggctgagctggaaagggaggagtgtcaggagaggaacagcgagtcttacgagcagcatatccatctagaacaccaccagaggcagcaagtggcctaccagaaatactcagaatttttccacgagaaggtggacccggccattgatgaaggcaagctggtggtgcaggacatcgagcaaagtgtatggatccacagtcacgtgggctccaaggagcacagccacatgctgcagaaggtccaggagcacatcaagagggtttcggatatggtggaggacctctacaggcggaaggcctgggctggcgcggaggaggcgatgactcggctggtcaacattctgatcctgtcagtcagggatgcacgagactggttgatgaaaacagagacccgcttaaagaaggaaggtattgttcaggaagatgattatgaaaatgaagttgaagactttggtgagcttcggcctagaaggcgttctcggaaatgtggaaagcagagaaaatactaatgtccacacagctgcagcctcctcatccttcggaacattccattctgacttagaattctgagcgctggggcagaagacaaaaagaatgtgaattagcattttaaaaatagataggggagtctaacaacaccattgctttttattctcattacttctctttcagtggcttaggatctgattgctccctcacctctaaagtgtttccaagtagagtctggcagtattagtttcccccacaaacaaattcaggtagagaagttgtagtcgaagggaatgttgggactcctcactgcatggtccctggggtgtctggctcatccccatcatgacatgagttggtagcagaggactaggtgttaggacagactctcctcacctcagttgctgctgctctgggccaggaaatctctctatggattccctcatctcctgccacactgctgcagcatcaagtgtgctatgagagctgtatgtgcccaggggtgggccctgccactggccaccccgagcccaggacgcattctggtcatctctgagcccacttgtagtgtagcttcttctgttagagatgttagccttttctctctgtggcgacttttctgccttcccttcttctgttttttgtgatcattcttagctacctgtgccaagtcacagttagactacctcagaatgtagtcaagaattcacccagtgttctttggatgtcccttccctagggggaaaggctggggaatgttgctgggagcattcccagctgcctctccaaagtggtcctaactctgccttggctatggtgcagacattccaaaaagtgttttgtatacagccctgtacatctagttttcttggttctccctggcaagttcgctaccctagcttaggctgacgttctgatgagtctctgcttgctgagctcatcactgtgggatggtgacctgcagagctgcagattggagcaagtggacagaggagggagccagctaagccaaatccgtcactgccacttggctggcaggccttataagagggcggatctgggcccgtttgcaggaggccattgcctaccctctccccacagtgagccagcagccatcagctgatcccacctgggaaaccttcatgcctctctgatggttactgcccacccttaccccacccctcagctcagcctggtatggaaagcaaggtgcacgttggtctttgattgttctgtcctcacagcagagccagctttccccccatgttgctgctgcttttgctgctcatgctgcttgttgttttctcttccttatctttccaaattgtttccttgaaatgcttgtttccaatttttcttagattatgtttctaatttttattccaggtgtttttttttcttacttgacagaaaaaaagaaaaccccaacaatatcttgctgtattatcacattttttataaagttaaagcatttctctt

SEQ ID NO: 79 - DNA, 6651 bp, Homo sapiens
ggccgagtcgtggcgggagacggtgcagctgtacgaggacgaggtgcgcgagctggaggaggcgctgcggcgcggccaggagagcagactccaggcggaggaagagacgcggctgtgcgcgcaggaggcagaggcgctgcggcgcgaggcgctcgggttggagcagctgcgcgcgcggctggaggacgcgctgctgcggatgcgcgaggagtacgggatacaggccgaggagcggcagagagcgattgactgcctggaggatgagaaggcaaccctcaccttggccatggctgactggctgcgggactatcaggacctcctgcaggtgaagaccggcctcagtctggaggtggcgacctaccgggccttattggaaggagaaagtaatccagagatagtgatctgggctgagcacgttgaaaacatgccgtcagaattcagaaacaaatcctatcactataccgactcactactacagagggaaaatgaatggaatctattttcaaggcagaaagcacctttggcaagtttcaatcacagctcggcactgtattctaacctgtcagggcaccgtggatctcagacgggcacatctattggaggtgatgccagaagaggcttcttgggctcgggatattcttcctcggccactacccagcaggaaaactcatacggaaaagccgtcagcagtcaaaccaacgtcagaactttctctccaacctatggccttttaagaaatactgaggctcaagtgaaaacattccctgacagaccaaaagccggagatacaagggaggtccccgtttacataagtgaagattccacaattgcccgcgagtcgtaccgggatcgccgagacaaggtggcagcaggtgcttcggaaagcacacggtcaaatgagaggaccgtcattctgggaaagaaaacagaagtgaaagccacgagggagcaagaaagaaacagaccagaaaccatccgaacaaagccagaagagaaaatgttcgattctaaagagaaggcttctgaggagagaaacctaagatgggaagaattgacaaagttagataaggaagcgagacagagagaaagccagcagatgaaggagaaggctaaggagaaggactcaccgaaggagaagagtgtgcgagagagagaggtgccgattagtctagaagtatcccaggacagaagagcagaggtgtccccgaaaggtttgcagacgcctgtgaaggatgctggtggtgggaccggtagagaggcagaagcaagagagctacggttcaggttgggcaccagtgatgccactggttctctgcaaggcgattccatgacagaaaccgtagcagaaaacatcgttaccagtatcctgaagcagttcactcagtctccagagacagaagcatctgctgattcttttccagacacaaaagtcacttacgtggacaggaaagagcttcctggggaaaggaaaacaaagactgaaatagttgtggagtctaaactgactgaggatgttgatgtttccgatgaagctggcctggactaccttttaagcaaggatattaaggaagtggggctgaaaggcaagtcagccgagcagatgataggagacatcatcaacctcggcctgaaagggagggaggggagagcaaaggtcgtcaacgtggagatcgtggaggagcccgtgagttatgtcagcggggagaagccggaggagttttccgtcccattcaaagtggaggaggtcgaagatgtgtcgccaggcccctgggggttggttaaggaggaggaaggttatggagaaagcgatgtcacattctcagttaatcagcatcgaaggaccaagcagccccaggagaacacgactcacgtggaagaagtgacagaggcaggtgattcagagggcgagcagagttattttgtgtccactccagatgaacaccccggggggcacgacagagatgacggctcggtgtacgggcagatccacatcgaggaggaatccaccatcaggtactcttggcaggatgaaatcgtgcaggggactcgaaggaggacacagaaggacggtgcagtgggcgagaaggttgtgaagcccttggatgtcccagcgccctctctggagggggacctgggttccactcactggaaagaacaagctagaagcggtgaatttcatgccgaacccacagtcattgaaaaagaaattaaaataccccacgaattccacacctccatgaagggcatctcctccaaggagccccggcagcagctggtggaggtcatcgggcagctggaggaaacccttcccgagcgcatgagggaggagctgtccgccctcaccagagaggggcagggtgggccggggagcgtttccgtggatgtcaagaaggtccagggtgctggtggcagttccgtgaccctggttgctgaagtcaacgtctcacaaactgtggatgccgatcggttagacctggaggagctgagcaaagatgaggccagtgagatggagaaggctgtggagtcggtggttcgggagagcctgagcaggcaacgcagcccagcgcctggcagcccagatgaggaaggtggagcggaggccccggctgctggcattcgcttcaggcgttgggccacccgggagctgtacatcccttcaggcgagagcgaggttgctggtggggcctctcacagctcgggacagcgcactccccagggcccagtgtcggccactgtggaggtcagcagccccacaggctttgcccagtcacaggtgctggaggatgtgagccaggctgcaaggcacataaaactcggcccctctgaagtctggaggactgagcgaatgtcatatgaaggacccactgcagaagtggtggaggtaagtgcgggaggtgacctaagtcaggcagcgagcccgaccggagccagccggtctgtgaggcatgtcacgctgggtcccggtcaaagtccactgtccagagaagtcatcttcctaggccctgcccctgcctgtccagaggcatggggctcgccagaacctggcccagcagagtcttctgcagatatggacggatcagggaggcacagcacatttggctgcagacaatttcatgctgaaaaggagattatttttcagggccccatttctgctgcagggaaggttggtgattattttgcaacagaagagtcagtgggtacccagacttctgtcaggcaactccagttaggccctaaagaagggttcagtgggcaaatccagttcacagctccactttcagacaaggtggagttgggtgtcataggagattctgtacacatggaagggttgccagggagcagcacatccatcaggcacatcagcattgggcctcagaggcatcagaccacccagcagatagtttaccatgggctggttccccaactgggggaatctggtgactcagagagcactgtgcacggagagggctcagcagatgtgcaccaggccactcacagtcatacctcgggtagacaaaccgttatgactgaaaagagcaccttccaaagtgtcgtttctgaatctccccaggaggatagtgcaggggacacatcaggggcagaaatgacatcgggtgttagcagatcctttaggcacattcgactaggtcctacagaaacggaaacctctgaacacattgccatccgtggacccgtgtccagaacatttgtgcttgctggttcagcggactcccctgagctaggcaagttagcagacagcagcagaacgctaaggcacattgcaccagggcccaaagaaacttcgtttacctttcagatggatgtgagtaacgtagaggcgatccgcagccggacacaggaagcgggagctctcggtgtgtctgaccgtggttcctggagagacgcggacagtaggaatgaccaggcagttggtgtgagctttaaggcctctgctggggaaggagaccaggcccacagagaacagggcaaggagcaggccatgtttgataagaaggtgcagctccagagaatggtagaccaaaggtcggtgatttcagatgaaaagaaagttgccctcctctatctagacaatgaggaggaggagaatgatgggcattggttttaataagcagaaacattttgttttaatggcagcctgttggcgacgtgccaacatccaaaggccttaacttattttaagaggccgagggagtctatgaaaatctccccttttttacttttttaaagagtactcccggcatggtcaatttcctttatagttaatccgtaaaggtttccagttaattcatgccttaaaaggcactgcaattttatttttgagttgggacttttacaaaacacttttttccctggagtcttctctccacttctggagatgaatttctatgttttgcacctggtcacagacatggcttgcatctgtttgaaactacaattaattatagatgtcaaaacattaaccagattaaagtaatatatttaagagtaaattttgcttgcatgtgctaatatgaaataacagactaacattttaggggaaaaataaatacaatttagactctaaaaagtcttttcaaaaagaaatgggaaataggcagactgtttatgttaaaaaaattcttgctaaatgatttcatctttaggaaaaaattacttgccatatagagctaaattcatcttaagacttgaatgaattgctttctatgtacagaactttaaacaatatagtatttatggcgaggacagctgtagtctgttgtgatatttcacattctatttgcacaggttccctggcactggtagggtagatgattattgggaatcgcttacagtaccatttcattttttggcactaggtcattaagtagcacacagtctgaatgcccttttctggagtggccagttcctatcagactgtgcagacttgcgcttctctgcaccttatcccttagcacccaaacatttaatttcactggtgggaggtagaccttgaagacaatgaagagaatgccgatactcagactgcagctggaccggcaagctggctgtgtacaggaaaattggaagcacacagtggactgtgcctcttaaagatgcctttcccaaccctccattcatgggatgcaggtctttctgagctcaagggtgaaagatgaatacaataacaaccatgaacccacctcacggaagctttttttgcactttgaacagaagtcattgcagttggggtgttttgtccagggaaacagtttattaaatagaaggatgttttggggaaggaactggatatctctcctgcagcccagcaccgagatacccaggacgggcctggggggcgagaaaggcccccatgctcatgggccgcggagtgtggacctgtagataggcaccaccgagtttaagatactgggatgagcatgcttcattggattcattttattttacacgtcagtattgttttaaagtttctgtctgtaaagtgtagcatcatatataaaaagagtttcgctagcagcgcattttttttagttcaggctagcttctttcacataatgctgtctcagctgtatttccagtaacacagcatcatcacactgactgtggcgcactggggaataacagtctgagctagcaccaccctcagccaggctacaacgacagcactggagggtcttccctctcagattcacctggaggccctcagacccccagggtgcacgtctccccaggtcctgggagtggctaccgcaggtagtttctggagagcacgttttcttcattgataagtggaggagaaatgcagcacagctttcaagatactattttaaaaacaccatgaatcagatagggaaagaaagttgattggaatggcaagtttaaacctttgttgtccatctgccaaatgaactagtgattgtcagactggtatggaggtgactgctttgtaaggttttgtcgtttctaatacagacagagatgtgctgattttgttttagctgtaacaggtaatggtttttggatagatgattgactggtgagaatttggtcaaggtgacagcctcctgtctgatgacaggacagactggtggtgaggagtctaagtgggctcagtttgatgtcagtgtctgggctcatgacttgtaaatggaagctgatgtgaacaggtaattaatattatgacccacttctatttactttgggaaatatcttggatcttaattatcatctgcaagtttcaagaagtattctgccaaaagtatttacaagtatggactcatgagctattgttggttgctaaatgtgaatcacgcgggagtgagtgtgcccttcacactgtgacattgtgacattgtgacaagctccatgtcctttaaaatcagtcactctgcacacaagagaaatcaacttcgtggttggatggggccggaacacaaccagtctttttgtatttattgttactgagacaaaacagtactcactgagtgtttttcagtttcctactggtggttttgatattgtttgtttaagatgtatatttagaatgacatcatctaagaagctgattttgctaaactcctgttccctacaatgggaaatgtcacaagaatgtgcaaaaataaaaatctgagg

SEQ ID NO: 80 - DNA, 3080 bp, Homo sapiens
gaaataatggaggaattgcgtagcctggacccacgacggcaggaattattagaggccaggtttactggagtaggtgttagtaagggaccacttaatagtgagtcttccaaccagagcttgtgcagcgtcggatccttgagtgataaagaagtagagactcccgagaaaaagcagaatgaccagcgaaatcggaaaagaaaagctgaaccatatgaaactagccaagggaaaggcactcctaggggacataaaattagtgattactttgagcgacgagtagaacagcccctctatggtttagatggcagtgctgcaaaggaggcaacggaggagcagtctgctctgccaaccctcatgtcagtgatgctagctaaacctcggcttgacccagagcagctggcgcaaaggggagctggcctctgcttcacttttgtttcagctcagcaaaacagtccctcatctacgggatctggcaacacagagcattcctgcagctcccaaaaacagatctccatccagcacagacagacccagtccgacctcacaatagaaaaaatatctgcactagaaaacagtaagaattctgacttagagaagaaggagggaagaatagatgatttattaagagccaactgtgatttgagacggcagattgatgaacagcaaaagatgctagagaaatacaaggaacgattaaatagatgtgtgacaatgagcaagaaactccttatagaaaagtcaaaacaagagaagatggcgtgtagagataagagcatgcaagaccgcttgagactgggccactttactactgtccgacacggagcctcatttactgaacagtggacagatggttatgcttttcagaatcttatcaagcaacaggaaaggataaattcacagagggaagagatagaaagacaacggaaaatgttagcaaagcggaaacctcctgccatgggtcaggcccctcctgcaaccaatgagcagaaacagcggaaaagcaagaccaatggagctgaaaatgaaacgttaacgttagcagaataccatgaacaagaagaaatcttcaaactcagattaggtcatcttaaaaaggaggaagcagagatccaggcagagctggagagactagaaagggttagaaatctacatatcagggaactaaaaaggatacataatgaagataattcacaatttaaagatcatccaacgctaaatgacagatatttgttgttacatcttttgggtagaggaggtttcagtgaagtttacaaggcatttgatctaacagagcaaagatacgtagctgtgaaaattcaccagttaaataaaaactggagagatgagaaaaaggagaattaccacaagcatgcatgtagggaataccggattcataaagagctggatcatcccagaatagttaagctgtatgattacttttcactggatactgactcgttttgtacagtattagaatactgtgagggaaatgatctggacttctacctgaaacagcacaaattaatctcggagaaagaggcccggtccattatcatgcagattgtgaatgctttaaagtacttaaatgaaataaaacctcccatcatacactatgacctcaaaccaggtaatattcttttagtaaatggtacagcgtgtggagagataaaaattacagattttggtctttcgaagatcatggatgatgatagctacaattcagtggatggcatggagctaacatcacaaggtgctggtacttattggtatttaccaccagagtgttttgtggttgggaaagaaccaccaaagatctcaaataaagttgatgtgtggtcggtgggtgtgatcttctatcagtgtctttatggaaggaagccttttggccataaccagtctcagcaagacatcctacaagagaatacgattcttaaagctactgaagtgcagttcccgccaaagccagtagtaacacctgaagcaaaggcgtttattcgacgatgcttggcctaccgaaaggaggaccgcattgatgtccagcagctggcctgtgatccctacttgttgcctcacatccgaaagtcagtctctacaagtagccctgctggagctgctattgcatcaacctctggggcgtccaataacagttcttctaattgagactgactccaaggccacaaactgttcaacacacacaaagtggacaaatggcgttcagcagcgggtttggaacatagcgaatccgaatggatctgatgaaacctgtaccaggtgcttttattttcttgcttttttcccatccatagagcatgacagcatcgattctcattgaggagaaaccttgggcagctccggccaggccttgtaggaaaaggccccgcccgaggttccagcgtcaacggccactgtgtgtggctgctctgagtgaggaaaaaattaaaaagaaaaactggttccatgtactgtgaacttgaaaacttgcagactcaggggggtccctgatgcagtgcttcagatgaagaatgtggacttgaaaatacagactgggctagtccagtgtctatatttaaacttgttcttttcttttaataaagtttaggtaacatctcctgaaaagcttgtagcacaaaggctcagctggggatggtgtttgacttcggaggaaaaaagttgctattgcccgttaaaggcactagagttagtgttttatccctaaataatttcaatttttaaaaacatgcagcttccctctccccttttttatttttgaaagaatacatttggtcataaagtgaaacccgtattagcaagtacgtggcaatgttcattccaatcagatgcagctttctcctccgtctggtctcctgtttgcaattgcttccctcatctcagtagggaaaaaattgagtgggagtactgagatgtgtgggtttttgccattggacaaagaatgaggttagaagactgcagcttggagtctctctaggttttcaactatttcttcacaatttgaacacttgacggttgtcccttttaatttatttgaagtgctatttttttaaataaaggttcatctgtcc

SEQ ID NO: 81 - DNA, 56093 bp, Homo sapiens
aagctttacgaggtatgagtatggtaacactctatataaatccctttttcattagaaagacaggaatgttatacataatgctgtcaatctaataaatacacatatcatctagtctttaacttttctgtttatcatttagtcattaaaatttctttggctttctaatgtttttgataaaatttctaaaactctccatatttaatggaggcctatttttttttctagccagaactttttgtagactacatttctggaagtgctcactgacaccactctgaaaaattagtacttagaatatactctaattggtataaatgatctctgaattgctatggaaaactgggagaatggttgcttcaggggagagaaagtaggaggctgtggacagcaatgaggagaattacagttcaccatataacacttttgtacttttaaagtccttaacatttacattattatctattcaattaaaaaatattgggaagattttactttgaacagttaatttttcccccatgggtaccgctgtcatatagttccaactaatcatgaacttgtgtatttcctgttctttgtaaatttaaactttgtaactcaccaggaagtttgaagccaaatttgtgtttcaaatatagcaactccaggatctctaggcagatgcatttgcatttgattttaaatgaatcttgatcccttactctcacttatgttttcccacatcctactttttttattttgttgtaagccatctaaaattctcaatgggatgaaactgggtataaatgaatacatgcatacaggaattatagtagcatattccttttcttttttctttttttttttttttgagacagagtcttgctctgtagcccaggctggagtgcagtggtgcgatctcggctcactatagcctccacctcccaggttcaagcaattctcgtgcctcaacctcccgagtaattgggactacaggtgcatgccaccacacctggctaatttttgtattttttagtagagatggggtttcaccatgttggccaggctgatctcaaactcctgacctcaaagtgatctgcctgccttggtttcccaaagtgctgggattactagcataagccactgcacctggcctccttttctgagttttataaaatttgatactttactgcacgctttgagactgtattaattgaaccatgttgatgaacaagtttttgtgatgggtatattaataaaatatagatcaaatttttatagttaaatcaatatcgagcttttctagtgctttcaaaaggacaacctgaattttcccagcactgaaatgatactgaaaccatttcatatcttctgtattaaggaaaaaggcttgaaaacatacaaaaaaccctagaggtggctttctcagaggcagtgtggatgcagccatctgttgtcctgctggatgaccttgacctcattgctggactgcctgctgtcccggaacatgagcacagtcctgatgcggtgcagagccagcggcttgctcatggtaaatgcatccaccactggcttaaggtcttgttcttttgtcagtcagcatttttagtcttaacaataaatctactctcttcagagaataatatatgtgttatgttaagtgttgtgtttgaggcccctgatggcattctacagttgtcctatagactgtaatagcaaaattggtagagtaaaaacagtgtgaaaattctgcaacttcatggttagtcctttagggtttttcattctcccttacttattgtttaatttacagatttactcttttgttcatttgacaaatatttgtcaaatgcttgtgcacagtctgtattctcaaattctaggagaaaaagaagggtgaacagtattagcgcagaacgatactaataatgatggctactgtgtatgagtagccagccctttcttggctttcttggattgctttgtattctacatgaagatattccctgggctttacaggtcaataaatggaaattcagagagattaatttgaccagggtgaccaacaaggagatgacagcatacactatgcgagaagtatacacagagtagtgtaggagcatataacctaaactgggggtgaggtgggataaggagttatcagggaaggctttttggaggagttgacaactgagccgagttttgatggaagagtagaaattagcatgaaccaatttcatgctaataaagaagcaaaggaagcgtggtctacaggcaaaagcacagaggtacaggaagtaatgatatgttggggaataccctgttgactggagcttagagtgcaaggagaggagtgctagggaggtgaggttggagggtttggcagcattgacttgcttcaaggttcttaagagctgaaatagatataaaatgcaactaagagtggcttggattattattacctagtgtgttaatctcaaattttgaaatctatagcatctataggactggtgttactaatcttacactcgatctgttactgttcttatactagatctattagtccagtgtttaagggagtggtgcagatttctaggtcaggacaggactcagatgtacattattaatgcctatttcagttctgaccttctcatatgaaaccttataagacctggggtaggaagagattgttctggaagtcataggaatatgaactgtattttgtttaacaaacaatacagtatggaaatttatcacccttccagaatatttatttcagagacaaatttttatcattcgttcatttatttcataagatccacgagtagggaacctcactagacattgctctgagtatatggtctgagtttgcagtacctcttgtgtctccattagatttattaggtcctcaatagataaatcagggaataactagatggattcattttttaaagacatgaaagagcgataccatacatactgcaccttaaaggtcaaccttagagtatcattatttttaatgaatgtataatttttaaatttcatgtttacttttcctaagcttttgcactatattgcttaattccagctttgaatgatatgataaaagagtttatctccatgggaagtttggttgcactgattgccacaagtcagtctcagcaatctctacatcctttacttgtttctgctcaaggagttcacatatttcagtgcgtccaacacattcagcctcctaatcaggtaatacactacttgtaaggattattgaattatgtcccttttatagaaattatttttcaattttattagtaattcgtggctttaaatttatgcttctcttaatgattttaaggatatgtaagtcaacatttggtgcatattgtgctagaggcataaattataatttatagccacctgaaatgttagtatgcgctttccaagaaaatgacttttttgaaaatggtatttctttgaatgagaaagaacagagagaaatagatagatggcttttaaacacttcattaattaaactttttttttccaccatcacataatggcacttagtcccctttgggaactcatgagggttttagtggtagtgagctgaaagaaatatgttccaggactggcaaacatattctaaattctttaaaattttcacctagcatctaccctaaatattcagaccctgtgctagttaactgctattgaagaacaaaggtattatatctattattaaggataatagaatggtatttgagatattggtcattgaatatgaatatgttttgagaaataagttttataggaaccaaaaaaaaattcttaaaggaaccatatattactaaaaatgcttcttattggagaaagaaatgacaatcatttattaatgtgattttttcacaactttattaagatataatttaagtacaacaaactcacataaagtgtacaatttgatcagttttaacatatgtagatgccatgaaaccatcaccacaattaaggaaacaaacattttcatcactccagaagtctcctagcccttttactacccattcctcccctgctccatccccagacaactaccaatttgctttctgtcactatagatttgtcaacctgattttctccaaatatacattcaaaaatatacagttgaatacaattggaaattcgaattttgtgtttttttctttaggaacaaagatgtgaaattctgtgtaatgtaataaaaaataaattggactgtgatataaacaagttcaccgatcttgacctgcagcatgtagctaaagaaactggcgggtttgtggctagagattttacagtacttgtggatcgagccatacattctcgactctctcgtcagagtatatccaccagagaaagtatgttttactattaaaacctgaacttggaatcttctttctattgtggagaaatgtaattgtagtaagacaagaattaaatatattccattgtagtatttgaataagcagttatttgagtagaaaattagtgtttccagctaagatgatggcatattttgaaaattcatatagtgaatataactagtaaaagaagttttgtttatttttaaacagaattagttttaacaacattggacttccaaaaggctctccgcggatttcttcctgcgtctttgcgaagtgtcaacctgcataaacctagagacctgggttgggacaagattggtgggttacatgaagttaggcagatactcatggatactatccagttacctgccaaggtatgtttaaaaaaagaaaaagtgaatacttactcccagaagaaccactgtattattggctttggctttatgtgtcagcttgcccaatctccgtgtgagtcaacaagtgtttactgagttaccaaataaatgtcttaacactattttaggtactttaacaaattttaattttattaattaattttttattagaattgagacctcactctgtcatctaggctggagtacactcacagctcactgcaacctcaaactcctgggctcaagcaatcctcctgcctcagcctccccagtagctagaactacaggcatgaaccaccatgcccggccaactctttaattttcttagagacggagtcttgctatgttgcccaggcagacagattttaatgtgtatgatgcagtctttgatgataagaaacttataatggaaagctgaggtgatagttacagtaaatacattttgatgtataattctgtttgctttaatcattcaaattgtagtaaagcaagatgaactgtctgctgggatttgagcagaaatggataggaataaactaggaggtagaagagttatcaaggttcacaggactgatgggtgaagctagatttccagacccgggatgtcagtccttgaaaagcagacttggcaggcatagacgaggcagatagcaggataaaggagacaaatgtagattgttcttcagaagatcagatggtagagtctaggaggtagtgtgttttaatcagagatctgagaggcaaagatcattgcatgagatcagggacccatgcaaaggagtgagaaaaaaaactgggttaaggagcctgctgcatggcaactcctgggaacagtggccactggggcctgggacatgttgattgcagcccaggactgttaaaaccagtgtgagagaacatgggtatggaagtactagctagcaggatcatgaccccgatgctgggatggggcatcaagcattagtacatggagattcagtacatccagatgcagtacatggagactatatgcgtaactgctgactttgggcttctttcagattggagcagaggtagaggtgagtgggaatattctcaatagagggaactaaataggcatacctaataaaggagaccaggatattgcagacagtagcctcatgtttggctcacctgttcaaaaagttctcttgttcttgagcagtggtgccttaaaaggtaacttgagaagcagtcgattatttgttcagcctggagactcttgggatattttactatctttgattgaatagatttaaatgtacacagctctcataacttgccccatgaagcatatccatgaaaggcactatacttgttaaaagattggtttgtactttttaaatgtagtacttttaataaaacaggaaaaatagaagttctgatgcagttatatgcattttatatagaatgtgttcttaattggaaaaaatttgtcgtagttcctttgagttcatttacagtttttagtaggaattgtattttctactgttgtacttgctgttactaaagaaagatggtcgtgattaccatctgaattttttttctatacattgatctttagctgctacttagtcatttctgtttagacttgagctctttttcatattttttttttttgtttctcagtatccagaattatttgcaaacttgcccatacgacaaagaacaggaatactgttgtatggtccgcctggaacaggaaaaaccttactagctggggtaattgcacgagagagtagaatgaattttataagtgtcaaggtatgttgtctacttatcttctttttttatttaggtaaaattaacataaatgcagttagccatttcaaagtgtaaattcactggcatttagtgcattcacaatgctatgcaaccaccacctctctctaatttcaaaactttttcattccactcctcctcttgcttatcccctggcaaccattcatctgctttttgtctctatggatttgccttttctgtatatttcatataaaacaaatcatgcaatatgtgaccttttttgtctggcttctttcacttatgtaatgttttcatggttcatccaggtagtagcatgtatcagtacttcattcctttgcatgactgaataatgttaccatactttgtttatccacttatcagtggtgaacatttgaattgtttctaccttttgactattatgaataatgttgctgtaaatattcatgcacaaatttctccacggatatgttttcatttctcttgggtataaactgaggagtagaattcttgggtcttagggtaattctctaacttttcaaagaaccaccaaactgtctttcacaccaactgcaccattcccactagcagtgtggggggttcctgattctccacatctttaccaacaccattatgtttctcaattgtgggctagtctcacatttggaaagctagtgggagcagcgatccatctattaaaagttgtatgaaattgagtaatgagccacctctctcttgtagggcttattatgttcttgcttaaggcaatcttcatgcattgtgaacagaattatacataaatgctcagataaaagggcaaaccattcttaaagggagtagacaactagaggcaggagaccatactgaggcaggaagctggggtttttatggttctgttacttttgactatatctcaccattgcttttgtcaaagtgagactaggtctaagtttttttcaggtataaggtgagtgtggtaattaaggggcatgctagcagatcattttgggtaatgcttcacagtccaccactggtgtgtcattgtggtcgcagatccagtatcttagctgtgtaatttcagacatcagcaatattagtttaacaaagggcaattagattccaagacaaaggaatcgtgtattattctagccttattcaaacttgatttataaatcagtttagtaatttatttatttgtttctgtatttatttttatttctttgagatggagtctcactctattggccaggctggagtgtagtgatgcaatcttggcttactgcaacctctgcctcctgggttcaagctattctcctgcctcagcctcccgagtagctgggattacaggctaatttttgtatttttagtagagatggggtttcaccatgttggccaggctggtcttgaactcctgacctcgagtgatctgcccgccttggcctcccaaagttctgggattacagacgtgagctaccgtgcccagctcagtttagtaatgtataactgggttttacccagttgtaaattactcttttgtcgtgtttttttgagaactggcaatgacggagaaactaaaagtgccaggctgttgccttgttcctgttattttgccttagttttttttttttttttttttttctctgagactgagtcttgttgtgttaccaggctagagtggagtggcatgatctcggctcactgcaacctctgcctcctgggttcaagtgattcctgcctcagcctcccgagtagctgggattacaggcgcctgccaccgcacccggtgaatttttgtatttttagtagagacgggattttaccatgttggccaggctggcctcgacctcctgacctcatgatccaccagcttcggcctcccaaagtgctgggattacaggcgagaaccaccgtgcccggtcttgccttagttatttcttgttccctcctctagtcctatagttctctgactgtattgaggaaatgtaattaaatattattatgttaatagatatttatgtggttgaatattagaaattccttattttggtcacatatcctgatcagtagttggtcttctggagatagtgatttttcactagagatgactttaggacctattcaggttttttttaagatcccaatttaaggaaagactattctcattattgattttgctatatgcagggaaatttatttcgaaaggtttttcagttggcttttagggaagattatatattctctttttttttttttggccttttcccacatgttctaaaaatgatatattctttaactcctatgaaaatacattgtttcagtaattgaagatgctgattaaagtcatatctctacacattttttaaaatttgagatagatgggactttgtcccttcttacaccattcacttattcacttggaaaaactattatccaatacttatgtggcagacactgtttctggcacaagggattcagcagtgaacaaaactgcctttttggagtttacattctactagtggaaagcgacaacaagcagatagacacattcagtatataattcactgtcagatggtggtggtaagtcctatgtaggaagaaaagcagggtaaggaggcttggagtaactggagtgagtcatagatggacttgtcaggaaagggtttctgaagaggtggtatttgggcagagatctaaataaaatgaagcaacaagccatgagaatatccgggggaaaatgttctgggcagaagcatcaagcatagaacttgtggtatgatatttattctagcacacattaattttaaaaatgtataaaagacatccatttaatcatattaaagatttccatgattcatttagacttagtcagaaaccaaatttatattttctttttaaataattttatctcaactcttattttacccaataggggccagagttactcagcaaatacattggagcaagtgaacaagctgttcgggatatttttattaggttggtagcctatgaatgtttttaaagtaactgactctgttattatttatcaatcagtgctttttttggtcttgttttttgaagaactgatatttgaaacctgtggtttatgtgaattattaataagctagaggacgtggattctctatttcatcaaataatacaaaacattttagatattaaattttggaaattatttggttttgttttacaatagaaatactcctcaaagtggaatcgaagtggttattcaaagaaatctcagagtagattcttatatgaagcaaataattgcccctaatttatctctaaattttgtaagttctaaattcttttttcccccagtttctaatttatctcttataagtcaagagtccatctggccaatttaatttcagtgagtgtaactattttgcatatattaaaaaactgtatatgaatacagaagatggtatttaaggatgaaaataattattcaaatgtgatagcattatggggagttttaaaataaaagttactgttttattcttccaaaaattttattataaagtatacagttaagagaatatacataaaatacatatgcagcttaaggaagaataataaaatgaatacttcatgtattcaccaccgagtttaccaggaaaaagcataaacaaaataaacctcttccacgtaattcctgggttaaagagaagttatagtggaaaatatttgggagcaaacgataatgaaaatactatccattaaaattgttagatgttgcaaaactgatttcaaggaaaatttatagtgttaaatgtttagaaaagaaaaaaggttagaagttaaccacttatgtatctatctcatgaaattaggaaaattatagatataaactaaaaaatatgttaaaagggaaataataaagataagaatgaagtttaatgaaacacaaaacagagaagctcacaaagccaagatttattttttgaacaccgagtacaattgacaaatctctaacaagtttgattaagaaaaaagaaagcatgaataaacaattttagggataaaaagggaaacatcgctaaagatatcccagaaatgtaaaagataataagggaatattatgaaaatattcatgccaatacatttgaaaacttaggtgacatagacaaaaacaaaattgaccaaaattgagcaaaaaagaaacaaaatctgagtagtcctgtaacttagtaaaaattgagttagaaaagttaaagaagtctttacacaaatcaaacatcagactcagttttctaggagagttttgccaaacattcaagtagcagataattctggtctatttttggccccagaagatatattttacttgccatgcatttaatgagatagctgttgatttttttcaatcaccgtgacaggtgttttatattaggtgttattcgccagacatctagtccacctgttgccagatatggaattaatattcacttattttgaattaaaatttgttaataaattaataaaacaaagtcaaagttcaaattattaaaaaagtaaaagaaataaaatatattttatagagagcccttacaaaacagtaccaacataatgagctttccaaattttgaatgggcaaaataaatgaataggcatttcacaaaagaaggaagggtggccaataagtatatattaatataaaaatggttacttgtaataggaatcaaaagtgtttgacttattgactaagagtcagtttttgttttgatccctgttagtctatccagaaggcatgggtcttaataaacaccttgacctcaacagtttactgaatacaagggtaatttcatatgccttgccttctttaagggtttgttgtaaagattaaaataaatacataaatatatataaatacatttatatgtatttatatgtaattacatacaacttgccttctttaagggtttgttgtaaaaattaaaagaagtatataaatatatataaatacataaaataaatacattcatatatgtatatgaaatcactttgccaactatgaagcctgattcaaatatgaaatgttgtttgtttttcccagagcacaggctgcaaagccctgcattcttttctttgatgaatttgaatccattgctcctcggcggggtcatgataatacaggagttacagaccgagtagttaaccagttgctgactcagttggatggagtagaaggcttacagggtaataattataaatacagaaatagaatgttataacaaaatgtcatcatgtcatcagattttggtaaaaaaatgttcttttttcctctaggtgtttatgtattggctgctactagtcgccctgacttgattgaccctgccctgcttaggcctggtcgactagataaatgtgtatactgtcctcctcctgatcaggtgacaatttcatatttagagtccaaaacccaacaaatgctacactctttccttgtgagctttacttctgccaggtaatggcaattgtccttagaagaccagctttcttagggaaaagctttagccactgtttgctcaaagcataaaaagattctgaattagatgcaaagcctttttttggcccagtgcaagtctgaaaactttgtaatccttctgtgttggctgattggggaaaaaaaaatgcaagaaacctaatgtattatattttcacattatcttctgttcaaagattacatacttccattatcctgtcaaaaaaaaaactctgatacagaatcaagcatgtgaatcgtaagcatgtaagcaggtttcatagagataatttttcaactcttccttgtcctgtgttgttccaactcttattctccaatttagaagcaaacaaataaatgaatgaaagaacagatagacaaatgaatagtcaaaggtataaagtatctgtatatatgttacatgtagctattatttaaattatttagattttccttttgaaataccttcttggcacacttgcctaaatctagaaaataagcactgtgtgaataagaaattatttacactgaatattttgtaggtttttgggtttttgtttttcagacaaggtctcactttgtcacccaggctggagtacactggtacgatcacaactcactgcagcctctatggcccaggctcaagcaatctccccacctcagcctcccgagtagctgggaccacaggcacacgctaccatgcccagataattttattattaatttttgtatagagatggggtctccctgtgttgcccaggctttcttgaactccagggctcaagtgatcctcccacctcaacctcccaaagtgttgggattacaggcgtgagccaccatgcccagccttaagagtgtttgattttcattcattttcctatatatattatttctgttggggaaaaaattccaaggaagataaatagtaggctgttggtacatttctcaacttacttataaagctttttagatatataaggttaatttatgaagaaaatcataagatacacaatttaagataatatttttaattttattttttatttgttaaataaatttttctcctttcaggtgtcacgtcttgaaattttaaatgtcctcagtgactctctacctctggcagatgatgttgaccttcagcatgtagcatcagtaactgactcctttactggagctgatctgaaagctttactttacaatgcccaattggaggccttacatggaatgctgctctcgagtggactccaggcaagttatatgaggaagttgttatgacattttatgagtgataaaagaagtacaatgtcaaaatttccaccttaaaaaatgctattttttaaacaactttggtaaaactgtatagaaacataaatttacctttagttgaatgttccatagttggaatatgggttttgcagagaatttataattatgaagtttgatgtctgtttctttaacattaccttaatattggcaaaaacatgttggtgtttgcaaggatattatttaaattgggataccatgaattaaatactacaaacaaaaataattagagttttttgtttgtttgtactttaacttttaaaaaataatcagttaaagttgttgttttgaagctcacattgttccaatctggccaataggagccccttttgtatggctcctgtatctttatgacatgtcctcatcattcttgaatcacttcctcacttccagatacagtaagttattcttggccaggtgcagtggttcacgcctgtaatcccagcactttggcaggccaaggcaggaggatcatttgggcctagtttgagaccaaatcatggttgcacaaactgtacccactatggacaacagagtgggatcttgtctctgtgaaaaatttaaaaattagctgggcatggtggcacatacctgtagtcctagcttcttgggagaggctgtggcaggaggatcgcttgagtaaatccaggatgcagtgagccatgcttgtgccactgcactccagcatggatgacagaatgagaccctgcccccaaaaaagaaaaatattcttggtttatcttgtactttctgtatcccagccctagcatcagccttttctctaaagacagtattatgattttaatatttacagtagatatttgaactgttacattatagactttaccatatattttctaggaaggattattctattactcttctttaccacatttgtttggaatgtctacagaacctacagtttctaaatcagaaactccctaggtttttgctattttggcaagccattgaagttcttccctctccctttactaccagaaaggtgtgtatttgtagagctctctataatgagaaagcactctataacatggttgattcatcattttggagtagaaaagtatgaatggaaagtcagagacataaaaataaagcccagaggtctgagtcttagcttcattacagactttcttgggggatggttggtaaattatctacacattctatcttgtctttataattttaatagttaaatttttaccatgtgcctcaaaaccgttagagaattaatgagctctttgaaaaatgcttctaagtttcttgtattgctctaatagaatgctatctatgttattatttatttctgagactaaaattgtttacatctttaaactggttgtccttttgtgtattttaggatggaagttccagctctgatagtgacctaagtctgtcttcaatggtctttcttaaccatagcagtggctctgacgattcagctggagatggagaatgtggcttagatcagtcccttgtttctttagagatgtccgagatccttccagatgaatcaaaattcaatatgtaccggctctactttggaagctcttatgaatcagaacttggaaatggaacctcttctgatttggtatcttgtgcagtcatcattatacagttctgaaatataaagctatatgttggtgtaaagttgcagtgatttctctcctaaccagccccacatattcttcctggttggttggttcttcagtaaaatagtcttgtttcttgcttacactaattggtaatttgcattccttgttaagattttcaagacagggctgggagcaaggaaccaaagtagcgcgtggttgtgattacctttggtttctttgaggtttctcttacctagtggctttaaaacatctttaggagcagttccattttatagtaaacttaaattctgttatcatgaacagttgaggataatgaataatttgatacaataatgtaagaaattcctgaaaacaaagtgttatctgtgatacttttgctgcatagtaagcacaatgaagtgtactgataatgtttcaacaggaaagtgttttgattaaatgtgggcagtatcactgttctactagcattcaacatctcttctaaaaattaatagtggttcactgtaattttattggtacatgtaacatctgtacatgtgtttggttatctatatgtttcctggttttttgtacatttgctttattaatttaggcttttttttttttttttttttgagacagtctcactctatcatccagactagagtgcagtggcacaattatggctcactgcagccttgacctcctgggcttaggtgattcttccacctcagcctcctgagtagctgggactacaggcacatgccaccatgcccagctaatttttgtatgttttgtagagacgaggtttcaccatattgcccaggctggtctcaaactcctgggctcaagctatctgcgtgccttgacctcccaaagtgctaggattacaggtgtgagccactatgcctagcctaactcagactttaaaaatataaaagcaattcatttttattcccaagaacagtaaggtggtggtttaattttagtctttaattctgtttttaatttattctatttagaaatgtcccagaaacttagtataactttactttctgaaaatgaagaaacctgtccttgggcattagtgtgttggatttaagcaacaaagttaaaaaaacctaccctgtgttatggcaattttcacttgatggtggttctataacacaggtatcagtgaacctttataaaagatgaacaacttttcagcttgcttaatttcagttaattaacatgtatacttatctatgttaatgttttattgcttaaaatgtttaatttttatatttggtaaacagatagttttttctctccccctcttccttccatctttcattactacaatttaccatgcagagctcacaatgtctctctgcaccaagctccatgactcaggatttgcctggagttcctgggaaagaccagttgttttcacagcctccagtgttaaggacagcttcacaagagggttgccaagaacttacacaagaacaaagagatcaactgagggcagatatcagtattatcaaaggcagataccggagccaaagtggagtatggctttttccccctcattataattgttaaaacttcttaaaaattgtttcacccttttgatatatatttctttgacttataaacgagctatatttataaacaagggaccagaacacattaactcagtcatggttatgtgcttccttgctttcaatgtttcattatcttataaggaagagaacgtatggtctcttgaaaaaactgacaataagaagtaacaactggactaccacatttttttttacatccttaatttaactcttcgtcaatttctttttttacttaaggaggacgaatccatgaaccaaccaggaccaatcaaaaccagactggctattagtcagtcacatttaatgactgcacttggtcacacaagaccatccattagtgaagatgactggaagaattttgctgagctgtaagtaacagattctgttttggaagtacagctactattacaagtgacatagtattacacttaaacctttaaagttcgtgtttaaaataaaaatattttgaatatttaaaagctaattcaaaaaatatgtgtcgtagctatgcattaaaaaaccccaaaatgtcagaagtacagaagtcaaaattgagttttcattaaccagttcatttgattatatttgaattattcataatggactcatttaattttagtaactttgggctgggtgctgtggctcatgcctgtaatcccagctctttgggaggccaaggcaggtggatcacctgaggtcaggagttcgaggcaagcctaaccaacacggggaaaccccatctctactaaaaatacaaaaattagccaggtgtggtggcatgtgcctgtagtcccagctacttgggaggctgagacaggagaattgcttgaacccaggaggtggaggttgcagtgagccgagattgcaccactgcactccatccagcctgggccacagagcgagactgtgtctcaaaaaaaaaaaaaaaaaatttagtaacttcgaagaaataagaaggaaaattaaaagttgaaagtgattctaatgtatagtttataaaattttgttataaaaatacctgttttgccttcaaaataatttatattaatattttattgacctcaagaacatttaaatacattcagatttattcatttgtggaccacatttgttatacattggatttaaaggatccttgcaattgagtttatggccacctatgcatctgagacccatggactgggaaccattctaggtcaatgattcagtgtgattcaatttaagagatgtttattcctggtctttagaagctgctaccttttgttatctaattttgcagtactttgaagtatgtatgtatgtgtacatacgttagtgctatgtatttattaaagaagaatcagaaaacagaggtaaggaaaaataaggaaacaaatttctgttaagcccaccacctcccaaagcatatttgtttatatgcttatatatgttttcctattatggtaagaacagtctgtacatattgctatatagcagtccccctttatccacatacatcctgaaaattgttttacattttaaatgttaactactttattgtttttaaatgtcattttatagtgtagctatgccacaatatccaatttttagacatttaaattgctcccaggcaatgtggtaatgaacattcttgcagctgaatatatgcacatatctaattgtttcactaggatagaggtggaattgtataacagggagctcacattttttaaggcttttgaaatgtattgccaaattgcctgccagatatactgcaccatcactaacattgtgtgttgcagtatttttctaaacttggcccttttgattttagaaaaatgatatcaataatttacatttctttgattaaagtgtagaagttataatttttcatattattcattgtcatttgtattttatcttttctaacttgtctcttcatcccctttgctccgttttctattggagtgcaactttatttgtaagaattctttttaatttctgtgactggaatttttttttctagtttgttatttcccgttcatttcttaaaatataattgtgtttgccaacaatccattatcttttgttttgtaatggtagtatttatacatattaaattatctctttcttttttcagatatgaaagctttcaaaatccaaagaggagaaaaaatcaaagtggaacaatgtttcgacctggacagaaagtaactttagcataaaatatacttctttttgatttggttctgttaagttttttgatggcttttccatatgttgtaacaggaaaaaaatggtgtctatgaatttcttcttaatttaacaaatttggttaatttataaaatcacagattggtaaatgctataattatgtaatgatcaggattgagattaatactgtagtataaattgggacattataacagattccatattttatttcctaaaatctaaattcagtctttaatgaaataatattagccaaatggtggaactaatttatttcttttgaggaaaagataataaagaatgtaattaaatttaaatttcttggaattcccagttgtatattcatcacctttgtagcatttgacaaattttatgcttagcagcttcttcactgttttgaaataaaatatcctattacctactgatacaattatctgttctttgtatatcaaaaaatgtgaaatttacacataattcaaatacatttaattatccgctcaaccagaaatgaaatcacatccctctactatactacatccagctccaagcccaagatatttaaatgacatccattcctctcctagttccagttatgattttatcttgatattctctcatatatgaactaaattataaagttagccaccatcaatacaatctgcgtatctaatatcttaactatatagtaatggggtaagggaacagcaaaaaggagaacattaattaaaatatacaagtaagcctgggcaacatagtgagaccccatctcttaaaaaaaaaattagccatgcatgatggtatgcctctagtcccagctacttgggaggctgaggtaggaggatcacttgctcccaggaggttcaaggttctaaaccagcaaagctcagaatcccaggggatagaaacaaagacttagtggatcactagtattaaactgagacacgtcaccctgcattgcactttgtttctcagttctttgatgaaatcactgagctgacatacctgccctcttttcaccataaagtgagtttcatgatcagaagcaatgtctatgggatagcctaacaaacaatgtaaaaaccatttagtaagttcatgaagggtggtggtggtaaaaatttggagaacatacaaaacaaatacaattccaaggtgtgtcccctccaggaaggacaaattgctgcctgctctgtgatagaagaggatcagatgtaatcaacctgccgtcagacttgggctgttctctcctgggtgtggacttgcctggttggtcactgctgctgacaagtaggctgtcaatatagctgggttgtcatgtcagctgtggtgagggggaagtccacattgtggaggccacatccctgcactcttggccaatttgaccatgaatcttaagcactggggtggctggaaaagacagccgattgacatccatacagaggtcatcttgaccacttgattagtataagcactgaaggcttttaactgagcattcacataggacacaaatattctgattctttgggcccattccaagaactctgggcatacttttcctccagacctcatacccagttgtgttctttccaaatttctggtcatctggttatgttattagccactatctgtgaatcagcatagatttttatatcagacatctctacctcctgacagaatggaggagatatgttacttaacaattctgttcccttggaagatttcctgtctccactgtttgtaagggctactccctcaatgtagcagtaatgctttcactctgatgggaagtcacagtggaattctgggtctccaagaattagtgttagtgcatacacagtgtctgataatccccagagtgtctggtgcccttggatcctgtgaagaaggcttggagaaaagaagattcatggcaagaacttgtgatgtgatgacagggccttttctctggctcttcattcttagtctgacctaggtgtgagaattaggtcaggggccatgactatattgtggtgactcaaaccaggcctttgtttactaactgggagatttttacattgtaagaatcaagtaggatctttgcccatgtattttggtcttaagaacacaaatgatatggctccaatgactggaggaacaccagggtccttggtctcacgctgatttagataaaacgactgtcaggcctctgagcccaagctaagccatcctcccctgtgacctgcacgtatacatccagatggcctgaagtaaccaaagaatcacaaaagcagtgaaaatggcctgttcctgccttaactgatgacattccaccattgtgatttgttcctgccccatcttaactgagcgattaaccttgtgaaattccttctcctggctcaaaacctcccccactgagcaccttgtgacccccgcccctgcccctaagagaaaaccccctttgattataattttccactacccacccaaatcctataaaatggccccacccctatctcccttcgctgactcctttttcggactcagcccgcctgcacccaggtgaaataaacagccttgttgctcacacaaagcctgtttggtggactctcttcacacggacgctcatgacatttggtgccaaaacctgggataggaggactccttcaggagaccagtcccctgtccttgccctcactctgtgaggacatccacctacaaccttgggtcctcagaccaaccagcccaaggaacagctcaccaatttcaaatcaggtaagcagtcttttcactctcttctccagcctctcttgctacccttcaaactccctctctcactacccttcaatctccctgtccttccaattccagttctttttcatctctagtagagacaaaggagacacattttatccatggacccaaaactccagcaccagtcacggacttgggaagacagtcttcccttggtgtttaatcactgcggggacgcctgcctgattattcacccacactccattggtgtctgatcacggtggggacacctgccttggtcactcacccacattcccttggtggtacgtcaactgcaaaagcaggggacgcctgctttggctgctcacccacccccttctctgtgtctctacctttctctttaaacttacctccttcactatgggcaaacttctgccctccattcccccttcttctcccttagcctgtgttcttaaaaacctaaaacctcttcaactcacacctgacctaaaacctaaatgccttattttcttctgcaacactgcgtggctgcagtacaaacttgataatagctttaaatggccagaatatggcactttcaatttctccatcctacaagatctagataatttttgtggaaaaatggaaaaatggtctgagatgcctgacgtccaggcattcttttacacattggtccctccctagtctctgctcccaatgcgactcatcccaaatctttcttctttctctcctgtctgttccttcagtctccaccccaagctctgagtcctttgaatcctcctttgctacagacccatctgaactctcccctcctccccaggctgctcctcaccaggccgagccaggtcccaattcttcctcagcctctgctcccccaccctataatccttttatcacctcctctcctcacactcagtccggcttacagtttcgttctgtgactagccctcccccatctgcccaacaatttcctcttaaagaggtggctggagctaaaggcatagtcaaggttaatgctcctttttctttatctgacctctcccaaatcagttagcgtttacgctctttttcatcaaatataaaaacccagccagttcatggcccatctggcaacaacccttacaggctttacagccctagaccctgaagggtcagaaggccgtcttattctcaatatgcattttattacccaatccgctcccaacattaaataaagctccaaaaattaaattctggccctcaaaccccacaacaggacttaattaacctcacttcaaggtgtacaagaatagagtagaggcagccaagtagcaacgtatttgagttgcaattccttgcctcaactctgagagaaaccccagccacatctccagcaaacaagaacttcaaaacacctgaactgcagcagccaggcgttcctccaggaccacctcccccaggatcttgcttcaagtgccggaaatctgaccattgggccaaggaatgcctgcagcccaggattcctcctaagccacgtcccatttgtgcaggaccccactggaaatcggactgtccaactcacccggcagccaatcccagagcccctggaactctggcccaaggctctctgactgactccttcccagatcttctcggcttagcagctgaagactgacactgcccgatcacttcagaagtcccctggaccatcacggatactgagcttcaggtaactctcacagtggaggctaagtccatcccctgtttaatcgatacaggggctacccactccacatcaccttcttttcaagggcctgtttccctttcccccataactgttgtgggtattgacggccaagcttcaaaaccccttaaaactcccccactctggtgccaacttggacaacattcttttatgcactctttttcagttatcctcacctgcccagttcccttattaggccgagacattttaaccaaattatctgcttccccgactattcctgggctacagccacatctccttgccgcccttcttcccaacccaaagcctccttcatatcttcctctcatatccccccaccttaacccacaagtatgggacacctctactccctccctggcaaccgatcacacgcccattactatcccattaaaacctaatcacccttaccctgctcaatgccagtatcccataccacaacaggctttaaagggattgaagcctgttatcacttgcctgctacagcacgggcttctaaaacctataaactctccatacaattcccccattttacctgtctaaaaaccagataagtcttacaggttagttcagaatctgcaccttatcaaccaaattgttttgcctatccaccctgtagcacccaactcgtacactcttttgtcctcaatgccttcccccacaactcactattccgttcttgatcttaaagatgcttttttcactattcccctgcacccctcatcccagcctctctttgcttttacctggactgaccctgacacccatcagtcccagcagcttacctgggctgtactgccgcaaggcttcagggacagccctcattacttcagccaagctctttctcatgatttactttctttccacctctctgcttctcaccttattcaatatattgatgaccttctactttgtagcccctcctttaaatcttctcaacaagacaccctcctgctccttcaacatttgttctccaaaggatatcgggtatccccctccaaagctcaaatttcttctccatctgttacatacctcggcataattcttcatgaaaacacatgtgctctccctgccaattgcgtctccaactgatctctcaaatcccaacctcttctacaaaacaacaactcctttccctcctaggcatggttggatacttttgcctttggatacctggttttgccatcctaacaaaatcattatataaactcacaaaaggaaacctagctgaccccatagattctaaatcctttccccactcctctttccattccttgaagacagctttagagactgctcccacactagctctccctgtctcatcccaacccttttcattacacacagccgaagtgcagggctgtgcagtcggaattcttacacaaggaccgggaccatgccctgtagcctttttgtccaaacaacttgaccttactgttttaggctcgccatcatgtctccatgcggtagcttccgctgccctaatacttttagaggccctcaaaatcacaaactatgctcaactcactctctacagctctcacaacttccaaaatctattttctttctcacacctgacgcatatactttctgctccccggctccttcagctgtattcactctttgttgagtctcccacaattaccattcttcctggcccagacttcaatctggcctcccacattattctggataccacacctgaccctgatgattgtatgtctctgatctacctgacattcaccccatttccccatatttccttcttttctgttcctcatgttgatcacatttggtttactgacggcagttccaccaggcctgatcgccactcaccagcaaaggcaggctatgctatagaatcttccacatccatcattgaggctactgctctgcccccctccactacctctcagcaagccgaactgattgccttaactcgggccttcactcttgcaaagggactacacgtcaatatttatactgactctaaatatgccttccatatcttgcaccaccatgctgttatatgggctgaaagaggtttcctcactacgcaagggtcctccatcattaatgcctctttaataaaaactcttctcaaggctgctttacttccaaaggaagctggagtcacacactgcaagggccaccaaaaggcgtcagatcccattactctaggaaatgcttatgctgataaggtagctaaagaagcacctagcgttccaacttctgtccctcatggccagtttttctccttcccatcagtcattcccacctactcccccattgaaacttccgcctatcaatctcttctcacacaaggcaaatggttcttagaccaaggaaaatatctccttccagcctcacaggcccattctattctgtcatcatttcataacctcttccatgtaggttacaagccactagtccacctcttagaacctctcatttccttccatcgtggaaacatatcctcaaggaaatcacttctcagtgttccatctgctattctactacccctcagggattgttcaggccccctcccctccctacacatcaagctcggggatttgcccctgcccaggactggcaaattgactttactcacatgccctgagtcaggaaactaaaatacctcttggtctgggtagacactgtcactggatgggtagaggcctttcccacagggtctgagaaggccactgcagtcatttcttcccttctgtcagacataattccttgggttggccttcccacctctatacagtccaataacggagcagcctttattagtcaaatcacctgagcagtttttcaggctcttggtattcagtggaaccttcgtaccccttactgtcctcaatcttcaggaaaggtagaatggactaatggtcttttaaaaacacaccccaccaaactcagcctccaacttaaaaaggaggatagagcccaaaaactcgcaaccaagctagtaattatgctgaacccccttgggcactctctaattggatgtcttaggtcctcccaaatcttagtcctttaatatctgtttttctccttctcttattcggaccttgtgtcttccgtttagtttttcaattcatacaaaaccgcatccaggccatcaccaatcgttctatacaataaatgctccttctaacaaccccacaatatcgccccttaccacaaaatcttccttcagcttaatctctcccactctaggttcccatgccgcccataatccctctcgaagcagccctgagaaacatagcccattatctctccataccacccccaaaatttttgctgccccaacacttcaacactattttacattatttttcttattaatataagaagacagcaatgtcaggcctctgagcccaagccatcatatcccctgtgacctgcacatatacatccagatggcctgaagtaactgaagaatcacaaaagaagtgaaaatggcctgttcctgccttaaccgatgacattccaccactgtgatttgttcctgccccaccttaactgagcaattaaccttgggaaattccttctcctggctcaaaacctcccccactgagcaccttgtgacccctgcccctccactacccacccaaatcctataaaatggccccaccccatctcccttagctgactccttttttggactcagcccgcctgcacccaggtgaaataaacagccttgttgctcacacaaagcctgtttggtggactctcttcacagggacgggggtgacaacaacacggacacacatggagtggttttaaggagcagagagtttaatacgcaaaaaagaaggaagaggctcccctgtacagacacagagggagggggctccaagccgagagaaggaaaccccatgtgcagtggaaaagtggttgattatactgggaggctggaggaggcggtgtctgatttgcacagggcccaggggattgggttgaccaggtgtatcattcatgtaccccgcaaaaaacctggccctcccacctcagccctttaatatgcaaatgtgggttgccatgatgttctgaaaacacatgaattatctggagggggccatgacacttggtacatgtgctgacaagaagagggtgggaatcgccatggtggccatgttgggtggacctagtttttaatagcctgcatttgcatatcaaagtttgctggcctggctctttaagctgtcttttctgttagaaaaggaatggtttggaatgggtgagggttgcttcttattacaagaaaatttccaaaaacctttactctttctagctgccaaaaaactatttcttaataacttatgtattaccataattaggcagcaccaaagatccctgcaggtcagaccactgcaattaacatgctggctttactgctgattatggtagctgcatccacctagcctctcatattgcaactgcctgacctctgccaccccacgagccacttatccccacttataatcagcccatttcgattgtaacatctgccacttattcccgacgttgtggtatatcctatagatgaattcattcaacatccattccaacaccacctctcttgccttcctatactctctggagagtgaattactgagtcacatgatcttcactgcagtcatttgtggctatgtgacatagttctggacagtgaacatagacagaagtccctggggcgggcttcctttctgggatgagggcaaaacgcctggagatacagcaattatcttgcaactgagagacaggactagctggatttcctaggccgactaagaatccctaagcctagctgggaaggtgaccacgtccacctttaaacacggggcttgcaacttagctcacacctgaccaatcagagagctcactaaaatgctaattaggcaaagacaggaggtaaagaaatagccaatcatctattgcctgagagcacagcaggagggacaacaatcgggatataaacccaggcattcgagctggcaacagcagcccccctttgggtcccttccctttgtatgggagctgttttcatgctatttcactctattaaatcttgcaactgcactcttctggtccatgtttcttacggctcgagctgagcttttgctcaccgtccaccactgctgtttgccaccaccgcagacctgccgctgactcccatccctctggatcctgcagggtgtccgctgtgctcctgatccagcgaggcgcccattgccgctcccaattgggctaaaggcttgccattgttcctgcacggctaagtgcctgggtttgttctaattgagctgaacactagtcactgggttccatggttctcttctgtgacccacggcttctaatagaactataacacttaccacatggcccaagattccattccttggaatccgtgaggccaagaactccaggtcagagaatacgaggcttgccaccatcttggaagcggcctgctaccatcttggaagtggttcaccaccatcttgggagctctgtgagcaaggaccccccggtaacattttggcaaccacgaacggacatccaaagtggtgagtaatattggaccactttcacttgctattctgtcctatccttccttagaattggaggaaaataccgggcacttgtcggccagttaaaaacgattagtgtggccaccggacttaagactcaggtgtgaggctatctggggaagggctttctaacaacccccaacccttctgggttggggacttggtttgcctcaagccagcttccactttcagttttcttggggaagccgagggccgactagaggcagaaagctgtcgtcctgaactcccggcagtagccggttgagatcatggtgtagccagaagtctcaacagtcgcccatgcatgcacccctatctttccttctgacccatacctcctgggtcccaaccacaactttcttcaaagtgtagccccaaaattctccttacctctgaatatacttcctctgatccctgcctcctaggtactattggttcagacttccatttcctctagcaagttgtatctccaaagggatctaaggaagctctgcgctgcgtccttaggcacctaggctataacccagggagtcttatccctggtgtccctcccaatttaggcatacagctcttgacatgggcagttatgtaggacccactccccaccacccttgccagggccccaagtttgtaaatggctgagggaaaagagagacagaggagagagagagaaatggaggagaaagagagagagacagagaggagagagagacagtgagagagacagaagagagagagagacaaagaggagagagagagagtcaaagagagaaagaaagagaaagaaatagtaaaaaacagtgtgccctattcctttaaaagccagggtaaatttaaaacctgtacttgataattgaaggtcttctctgtgaccctatagcactccaatccactttgtggtcagtgtaaataagagcataggccgaaagcactgaggccattgacaacccgtagcttccctatcaaaaatccttaacccagtaacccgcagatggaccaaatgcattcagtcggtagcgcaactgctttgctaaaagtagaaaagtaacttttagaggaaacctcattgtgagcacacctcacctgttcagaattattctaataaaaaaagcaaaaaggtagcttactaactcaaaaatcttaaagtatggggctattctgttagaaaaaggtaatgtaactccaaccactgataattcccttaacccagcagatttcctaacgggatttaaatcttaattaccatacaaaggtccgaccagacctaggcggaactcccttcaggacaggacgatagatggttcctcccaggtgattgaggaaaaaaaccacaatgggtattcagtaattgatacggggactcttgtggaagcagagttagaaaaattgcctaataactggtctcctcaaacgtgtgagctgtttgcactcagccaagccttaaagtacttacagaatcaaaagactatctcaatcctgattcaaaaggttagctacaccctctctgtaatgcatttgcataagaacttgtttatgggaatgcatcttgatggggcagctgggttgttataaaataggaacccagcccagctctaggactcacccctgagcgcaaaggcaatgttgggcatgctggtaaaggaccactagaatccagcagcccagacccctttctttgtggtcaagaaaggcgggaaaaggggtgcaggactgctacatcggtaagcataactaatccgataaacagaggtccatgggtggttacgcaccctggaaaggaactcacccctgagcacaaaggcaatgttgggcacgctggtaaaggaccactagaatccagcagcctggacccctttctttgtggtcaagagaggcaggaaaacaggtgcaggactgcaacatcagtgagcataactaattcgataagcagaggtccatgggtggtgatgcaccctggaaagaataagcattaggaccatagaggacactccaggactaaagctcatcggaaaatgactagggttgctggcatccctatgttcttttttcagatgggaaacgttccccgcaagacaaaaacgcccctaagacgtattctggagaattgggaccaatttgaccctcagacactaagaaagaaacgacttatattcttctgcagtgccgcctggcactcctgagggaagtataaattataacaccatcttacagctagacctcttttgtagaaaaggcaaatggagtgaagtgccataagtacaaactttcttttcattaagagacaactcacaattatgtaaaaagtgtgatttatgccctacaggaagccttcagagtctacctccctatcccagcatccccgactccttccccaactaataaggaccccccttcaacccaaatggtccaaaaggagatagacaaaagggtaaacagtgaaccaaagagtgccaatattccccaattatgacccctccaagcagtgggaggaagagaattcggcccagccagagtgcatgtgcctttttctctcccagacttaaagcaaataaaaacagacttaggtaaattctcagataaccctgatggctatattgatgttttacaagggttaggacaattctttgatctgacatggagagatataatgtcactgctaaatcagacactaaccccaaatgagagaagtgccaccataactgcagcctgagagtttggcgatctctggtatctcagtcaggtcaatgataggatgacaacagaggaaagagaatgattccccacaggccagcaggcagttcccagtctagaccctcattgggacacagaatcagaacatggagattggtgctgcagacatttgctaacttgtgtgctagaaggactaaggaaaactaggaagaagtctatgaattactcaatgatgtccaccataacacagggaagggaagaaaatcctactgcctttctggagagactaagggaggcattgaggaagcgtgcctctctgtcacctgactcttctgaaggccaactaatcttaaagcgtaagtttatcactcagtcagctgcagacattagaaaaaaacttcaaaagtctgccgtaggcccggagcaaaacttagaaaccctattgaacttggcaacctcggttttttataatagagatcaggaggagcaggcggaacaggacaaacgggattaaaaaaaaggccaccgctttagtcatgaccctcaggcaagtggactttggaggctctggaaaagggaaaagctgggcaaattgaatgcctaatagggcttgcttccagtgcggtctacaaggacactttaaaaaagattgtccaagtagaagtaagccgccccctcgtccatgccccttatttcaagggaatcactggaaggcccactgccccaggggacaaaggtcctctgagtcagaagccactaaccagatgatccagcagcaggactgagggtgcctggggcaagcgccatcccatgccatcaccctcacagagccctgggtatgcttgaccattgagggccaggaggttgtctcctggacactggtgcggtcttcttagtcttactcttctgtcccggacaactgtcctccagatctgtcactatctgagggggtcctaagacgggcagtcactagatacttctcccagccactaagttatgactggggagctttattcttttcacatgcttttctaattatgcttgaaagccccactaccttgttagggagagacattctagcaaaagcaggggccattatacacctgaacataggagaaggaacacccgtttgttgtcccctgcttgaggaaggaattaatcctgaagtctgggcaacagaaggacaatatggacgagcaaagaatgcccgtcctgttcaagttaaactaaaggattccacctcctttccctaccaaaggcagtaccccctcagacccaaggcccaacaaggactccaaaagattgttaaggacctaaaagcccaaggcctagtaaaaccatgcagtaacccctgcagtactccaattttaggagtacagaaacccaacagacagtggaggttagtgcaagatctcaggattatcaatgaggctgttgttcctctatagccagctgtacctagcccttatactctgctttcccaaataccagaggaagcagagtggtttacagtcctggaccttcaggatgccttcttctgcatccctgtacatcctgactctcaattcttgtttgcctttgaagatacttcaaacccaacatctcaactcacctggactattttaccccaagggttcagggatagtccccatctatttggccaggcattagcccaagacttgagccaatcctcatacctggacacttgtccttcggtaggtggatgatttacttttggccgcccattcagaaaccttgtgccatcaagccacccaagcgctcttcaatttcctcgctacctgtggctacatggtttccaaaccaaaggctcaactctgctcacagcaggttacttagggctaaaattatccaaaggcaccagggccctcagtgaggaacacatccagcctatactggcttatcctcatcccaaaaccctaaagcaactaaggggattccttggcgtaataggtttctgccgaaaatggattcccaggtatggcgaaatagccaggtcattaaatacactaattaaggaaactcagaaagccaatacccatttagtaagatggacaactgaagtagaagtggctttccaggccctaacccaagccccagtgttaagtttgccaacagggcaagacttttcttcatatgtcacagaaaaaacaggaatagctctaggagtccttacacagatccgagggatgagcttgcaacctgtggcatacctgactaaggaaattgatgtagtggcaaagggttgacctcattgtttacgggtagtggtggcagtagcagtcttagtatctgaagcagttaaaataatacagggaagagatcttactgtgtggacatctcatgatgtgaatggcatactcactgctaaaggagacttgtggctgtcagacaactgtttacttaaatgtcaggctctattacttgaagggccagtgctgcgactgtgcacttgtgcaactcttaacccagccacatttcttccagacaatgaagaaaagataaaacataactgtcaacaagtaatttctcaaacctatgccactcgaggggaccttttagaggttcctttgactgatcccgacctcaacttgtatactgatggaagttcctttgtagaaaaaggacttcgaaaagtggggtatgcagtggtcagtgataatggaatacttgaaagtaatcccctcactccaggaactagtgctcagctagcagaactaatagccctcacttgggcactagaattaggagaagaaaaaagggcaaatatatatacagactctaaatatgcttacctagtcctccatgcccatgcagcaatatggaaagaaagggaattcctaacttctgagagaacacctatcaaacatcaggaagccattaggaaattattattggctgtacagaaacctaaagaggtggcagtcttacactgccggggtcatcagaaaggaaaggaaagggaaatagaagagaactgccaagcagatattgaagccaaaagagctgcaaggcaggaccctccattagaaatgcttataaaacaacccctagtatagggtaatcccctccgggaaaccaagccccagtactcagcaggagaaacagaatggggaacctcacgaggacagttttctcccctcgggacggctagccactgaagaagggaaaatacttttgcctgcaactatccaatggaaattacttaaaacccttcatcaaacctttcacttaggcatcgatagcacccatcagatggccaaatcattatttactggaccaggccttttcaaaactatcaagcagatagtcagggcctgtgaagtgtgccagagaaataatcccctgccttatcgccaagctccttcaggagaacaaagaacaggccattaccctggagaagactggcaactgattttacccacaagcccaaacctcagggatttcagtatctactagtctgggtagatactttcacgggttgggcagaggccttcccctgtaggacagaaaaggcccaagaggtaataaaggcactagttcatgaaataattcccagattcggacttccccgaggcttacagagtgacaatagccctgctttccaggccacagtaacccagggagtatcccaggcgttaggtatacgatatcacttacactgcgcctgaaggccacagtcctcagggaaggtcgagaaaatgaatgaaacactcaaaggacatctaaaaaagcaaacccaggaaacccacctcacatggcctgctctgttgcctatagccttaaaaagaatctgcaactttccccaaaaagcaggacttagcccatacgaaatgctgtatggaaggcccttcataaccaatgaccttgtgcttgacccaagacagccaacttagttgcagacatcacctccttagccaaatatcaacaagttcttaaaacattacaaggaacctatccctgagaagagggaaaagaactattccacccttgtgacatggtattagtcaagtcccttccctctaattccccatccctagatacatcctgggaaggaccctacccagtcattttatctaccccaactgcggttaaagtggctggagtggagtcttggatacatcacacttgagtcaaatcctggatactgccaaaggaacctgaaaatccaggagacaacgctagctattcctgtgaacctctagaggatttgcgcctgctcttcaaacaacaaccaggaggaaagtaactaaaatcataaatccccatggccctcccttatcatatttttctctttactgttcttttaccctctttcactctcactgcaccccctccatgccgctgtatgaccagtagctccccttaccaagagtttctatggagaatgcagcgtcccggaaatattgatgccccatcgtataggagtctttctaagggaacccccaccttcactgcccacacccatatgccccgcaactgctatcactctgccactctttgcatgcatgcaaatactcattattggacaggaaaaatgattaatcctagttgtcctggaggacttggagtcactgtctgttggacttacttcacccaaactggtatgtctgatgggggtggagttcaagatcaggcaagagaaaaacatgtaaaagaagtaatctcccaactcacccgggtacatggcacctctagcccctacaaaggactagatctctcaaaactacatgaaaccctccgtacccatactcgcctggtaagcctatttaataccaccctcactgggctccatgaggtctcggcccaaaaccctactaactgttggatatgcctccccctgaacttcaggccatatgtttcaatccctgtacctgaacaatggaacaacttcagcacagaaataaacaccacttccgttttagtaggacctcttgtttccaatctggaaataacccatacctcaaacctcacctgtgtaaaatttagcaatactacatacacaaccaactcccaatgcatcaggtgggtaactcctcccacacaaatagtctgcctaccctcaggaatattttttgtctgtggtacctcagcctatcgttgtttgaatggctcttcagaatctatgtgcttcctctcattcttagtgccccctatgaccatctacactgaacaagatttatacagttatgtcatatctaagccccgcaacaaaagagtacccattcttccttttgttataggagcaggagtgctaggtgcactaggtactggcattggcggtatcacaacctctactcagttctactacaaactatctcaagaactaaatggggacatggaacgggtcgccgactccctggtcaccttgcaagatcaacttaactccctagcagcagtagtccttcaaaatcgaagagctttagacttgctaaccgctgaaagagggggaacctgtttatttttaggggaagaatgctgttattatgttaatcaatccggaatcgtcactgagaaagttaaagaaattcgagatcgaatacaacgtagagcagaggagcttcgaaacactggaccctggggcctcctcagccaatggatgccctggattctccccttcttaggacctctagcagctataatattgctactcctctttggaccctgtatctttaacctccttgttaactttgtctcttccagaatcgaagctgtaaaactacaaatggagcccaagatgcagtccaagactaagatctaccgcagacccctggaccggcctgctagcccacgatctgatgttaatgacatcaaaggcacccctcctgaggaaatctcagctgcacaacctctactacgccccaattcagcaggaagcagttagagcggtcgtcggccaacctccccaacagcacttaggttttcctgttgagatgggggactgagagacaggactagctggatttcctaggctgactaagaatccctaagcctagctgggaaggtgaccacatccacctttaaacacggggcttgcaacttagctcacacctgaccaatcagagagctcactaaaatgctaattaggcaaagacaggaggtaaagaaatagccaatcatctattgcctgagagcacagcaggagggacaatgatcgggatataaacccaagtcttcgagccggcaacggcaaccccctttgggtcccctccctttgtatgggagctctgttttcatgctatttcactctattaaatcttgcaactgcactcttctggtccatgtttcttacggcttgagctgagctttcgctcgccatccaccactgctgtttgccgccaccgcagacccgccgctgactcccatccctctggatcatgcagggtgtccgctgtgctcctgatccagcgaggcacccattgccgctcccaatcgggctaaaggcttgccattgttcctgcatggctaagtgcctgggttcatcctaattgagctgaacactagtcactgggttccatggttctcttctgtgacccacagcttctaatagagctataacactcaccgcatggcccaaggttccattccttgaatccataaggccaagaaccccaggtcagagaacacgaggcttgccaccatcttgggagctctgtgagcaaggacccccaagtaacacaaccatgagggtgcaaatgcatgggccactaatggtagagcaagaaaacagaagggccctggttcctcgaaggcatcagtgagctgaaatgcctgccctggatgtcctattcctaggtgtttttctgcctgaagcagattaaaccctttgttcacttctccaagtagggcttctattacagcccaaatcaatccccaccccagatgacatcatcctattaatacttttcaaagtcttcctgtccttaaacttccagcttccccaaaaccccacagaagatcagcagtctgctctcctaagggagcctgggcctgactggcatagctctcccttacaatagtaagcaattaattcagctttgcgacttgatcagtccaaagtggctgccagtttgaaaatctcagaaaggtaccatatgtactaagagaagccctgacatgagggcctaagccaaaagttggcccacatccttcctcttccaaatttaggatgggcactgtaaagataaatatgaatttaataagtttaattccacctgttgaaaatgaggcaagaaattttcctcccctccatgtcaggttattacttgagaaaacttgtatgtgctttctcagtctctttgaaatatatatatgtatataattttttttttattttgagacggagttttgttcttgtttccaggctggagtgcaatggtgcaatctcggctcaacctccgcctccgggttcaagtgattctcctgcctcaacctccctggtagctaggattacaggcatgtgtcaccatgcctggctaatttttttgtatttttagtagaaatgggtttcatcatgttggccaggctggtttcgaactcctgacctcaggtgatccacctgccttggcctcccaaagtgctgggattaaaagcatgagccatcatgcccagcctgaaatacatatacagatatatatatttaaaaactgaatcagccttttgtcagctttatgacctaggaatgtctttctcaaggatctgggaaatgtaaacattaccagatagcatacctatcttccagtttctgtgggagggtaacagcctaatcttaatgagtaccttgcaccaagctataaaagtaactcctgtttccacactcccccacccccgaaaagttgatatcttagataacacaagtggtcacatcaattatcaggtaaagttagaatgaactgtgtgaccagtggtgctgtcaagttctcttagttgaggactatttatctcgaaaacatacatgtaatgggctgtacctgcttggctgtacaaaatggtgaaatttccttctgtctttgtgatctcttagcaaagtgcctgtgatgtgcatcacattctcatttaatttttattcaataataaagcttatctttctctactgccttcatggagaggatttctgggttgagagaagattttgttttttaaattatatttccccaacagcaccttcaccctttattctaaaactgctggctgggtgtggtggcttatgcctgtaatcacaaccctttgggaggccaaggtcggaggactgcttgaggccaggagtttgagaactagcctaagcaatatagtgagaccccatctcttaaaaaaaaatagctgggcatggtagtgcacaactgtggtcccagctactcaggaggctgaggtaggaggatcacttgagcctgggaggtggaggctgcagtgagcagtgatcacaacagtgcactccagcccgggtgacagtgcaagaacctgtttcaaaaaaaaaataaaattgctgtctttttcactcacaccttcactattcatggggagaagtgtgtaaggtataacagtctttttgtaataaacctccccacttccactcttctaatcagaagtagagatgatgttatgagaagttgagattaaggttgtagcttttcttttttcttttttttgagaccgagtctcactctgtcggcccagactggagtacaacggtgcgatcttggctcactgcaacctccccactgcccaggttcaagtgattctcctgcctcagcctcctgagtaactgggattacagggatgtgccaccacgccgggctaatttttgtatttttagtagagacgaggtttcaccatgttgaccaggctagtcttgaactccaggcctcaggtgatcccccaacctggcctcccaaggtgggggattacaggcatgagccaccatgcctggcagattgtagcttttttgtttacagtttggtaattacttcatgccagtctgtcatgtttaataaacaacacaggttagtgattgctttttttctttttttttttgagatggagtttccctcttgtcatccaggctagagtgcaatggcgtgatcttggctcactgcaacctccacctcccagattcaagtaattctcctgcctcagcctctggagtagctgggattacaggcagcggccaccacagccagctaatttttgtatttttagtagagatggggtttcaccatgttggccaggctggtctcaaactcctgacctcaggtgatccacccgcctcggcctctcaaagtgccaggattacaggcatgagccactgcacccagccaattgcctcttcttcaacagaaaagaaagaaaatgaaactatgtaagttcagccatgtgcagggatgctttagaaataacatttagatttttaatttgtattagattctttggacctagtactgtatttctcacagtagcatttacccaatttctttcggatcctacgtatggcagttcagcagtgacatttccatggtattttcttaacttctttaggcctcatttttcctatctgtagaatgagggagttagattagatggtctctaaatccgtacatctacaaagaatatgaatctttgaaaaattgttttctttatctggatcacaagccactatcaatctatgagaatctgcactggagttgaagaaacaagctttattcacaaaatcaaattttatttgcctagaaatgttcggcttacaaaacctgaaatgaactctttggaagctcctctatggcattattctgatgctcagggcatcaacatgctgggacactcccttgcctaacctctgtgcccaggggccctgcctgaggacgctggcaggattctctagcttgctctgaaaaacgatgcctttgctgaagccactcttctggttgtccttttatggcctgtccccatttcagtgattcccctgcaagctgaagcatgcagcagttagaccagtttttccattcttcttaattcccaaggccctttcctaggctttcataatgcaagacacaaggacagatgattattatttctaggcttcggatatttgtgcagaggactagagttgagaaagggagccttgactgtggtaggcctgaatgtgttctaagtttggacatgacctcagagtgagcactgaggctggcccacaggccagaaacccacaaaaatatggctgtccatcttgcccacctgcctaacagtttgtcccataaaagcattaaattaggagacagaaatcaactaggtgcagagttttgttactgcattgcacgtctcctgagttctcaaatccgtattttcaattatctaatggatattcaagtccaggagatggctcacagtcctcacattacaaaacagaacacacacctcacatcacatgcaaatctccacctagccttgtttactaactgggagatttttaaattataagaatcaagtaggatctttgcccacgtatttttttaagagtttttcacctaccaaaaagttgtactcaatgtcttccttaattcatcctcctcactcagtctctatttacaactggttattaaattctgttgactttatctcctatatatctattttttaaagattatggtaaaatatgcataacaaaacttacaattttaaccttttttttgagactaagtctcgctctgtcccccaggctggagtgcagtggcgcaatctcaactcactgcaacctctgcctcctgggttcaagcaattcctaggcctcatcctcccagcagctgggactacaggcacccaccaccacactcgactaatttttgtatttttaatagagatggggtttcgccacgttggccaggctggtccttaactcttgacctcaactgatctgcctgccttggcctcccaaagtgctgaaattacaggcatgagccaccgcacccaggtatcaacctttttttttttttttttgagacggaatctggctctgttgcccaggctggagtgcagtggcgcgatctcagctcactgcaagctccgactcccaggtcacaccattctcctgcctcagcctcccgagtagctgggactacaggtgcctgccaccatgcccggctaattttttttttatttgtttttattttttagtagagacagggtttcaccatgttagccagaatggtctcaatctcctgacctcatgatccgcctgtcttggcctcccaaagttctgggatttacagccatgagccactgcgccagcccagtattaaccatttttaagtgtacaatttagtgtcattaagtacattcatcatgttgactactgtcactacccatttccagaattttttcaaaatcactccaaaccgaaaatttgtacccacaatacccctcttcccacaaccctggtaacctctaatgttctgtatctatgacataatttgcctattctaggtaactaactcatataagtggaattatacaatatttgtccttttaagtttggcttatttccattaacatgttttcaaggttcatcattatagcatgtatcagaatttcattccttctacggctgaataatatcccactgcacgacctcaccacgttttgatcatccattcgtctgctgatgggtccttgtgttgtttctatctctgtcagcttgggctgctgcaacaaaataccgtagcctgagtggtttaaacaacacacattcatttctcacagttctggatgctgagaacccaagagcaaggtgctagcagatttgggttctggtgagagctctcttcctggctgtggccaccttctggctgtcttcttacatagtgaggagagaaaggaaggctttggtctgttctcctcttcctaaaaggacactaattccactatgcgggctccaccctcatgacctcgtagaaatctgattacctcccaaaggccctactcccctaataccattgccttgggggccagggctttaacatatgaacttggggcatggggatcaggcacacattcagcctgtaacaccatttagattaccatctttggacctaaatatctattttaaagttgtatttttttcctgactacgtaagtagtggatgctagtaatacaaacttcaaaatttttaaaagcataaagaatattaaaatgactgtaattccaactatgcttgttattttgtttgttccagttttctttatatgcatatgtatgcatgtgtatatgtgtgtgtttttgttttttttttttacaaaatcagaatcattatgtagttgtgtccaggttttacactaaacattttataaacttttttttgcgttattaaaaattatttgtaaatggtatttctgatgacagcataaaattctattagaaaaatatcaaaattcattttcctattgttggacctttagattgtttctggtttttcacaactttaaatactgttaacaacttctttttatacccattttttggtccacattttaaatcctcttagcatggattcttagaaatgaaattactggatcaagaagtacttttaatacttttaagattatagatacatattgctattctaaaaagctatgttaatttacattggccaccagctggatagggtgtccctctgtgcctctgaggtggtccctagtggtctctgcccttggaattcacgcccttgtgtggtcctgtgttcacactgtaccagagttggtctgtgtgacccaacagcatatggcagaagtgctggtatgtcccttctttcagattaggttatagaaaagatggtggcttccatcttgggtgcaactgcccttgcgtctttctgtcacggaccatttgctgtgagcaaacctgtggaggcccacagagaggaatggaagcttcctgccaacagccacatgagggagctgtttctcccattttattctttgcttttcaatttagtatataaactttaaaaataatccaatctatctttccctatgtgatctctttcattactttttgatttaaaaaatgtatcaaagcactacatattcatagcaaaaagatggccaaataattctaaacagtttataatgagaaacagtagttccttgccttctctttcagagtctcagcaactgttatcagccagaattcgatcagagaaacagaaccactaggagcgatatagaaaaggaatctataaaggaaactttaccttacacaattgttggagcttgctgaacactctgtgtaaggctgttgcttctgtgtttggtgttggggccttaagtcagcagcgcaggcagtctggaagggaagacagatttcaagtggaggacaggaaagaaaaacttgaacctacatcagtctcttaccctcgccaaacctccaattcagatgatacaggcaccctgcagaagaagctggtgacctttaccacagagctaagcatgcgcctggcccaggagtggctgaagctgaaggaagtcactcccaagttctttcctagaatcatgatgtgaatataggaaaataatgaaatcactgactttattttctcagctggtcattcactccctttcaagggtttaagaactactatttataaaatattctagatatgtatagactaaaagccagcggttgttcaccaccagttgggcacttatgcaaacaaacgtgtgtgtgtgtgtgtgcttattgtaaaaaatttggaaaatactgcttgttagagaaaatttggaaaatactgcgaagtataaagctgaaaaaagtagctgcagaaaacctctgttgacatgttaaaattctggaggaatttccgtctttttttttttttttttttttttgagagaaggtctcacttctatcacccaggctggagtggtggcacaatcatgggtcactgcagctcaagtgatcctccacctcagcctcttaaagtgctgggattacaggcatgagctactgtgcctgggctccttccatcttttataaaagatgcttcttgtttgcagaattgctatcatacagttctacattctgcttttttctcttatttattgtgaacctttccgctactacgagcaatcttccttgtgggtcaccattaagaggtgcttaaataaattactgtgcatttatgcatctgacccaataattaatggcccacctcttgtgggtcatttgggttccttctcttggcacagaccttctcctggcttatatttcttgggtgtaggaggtataccctcctaccaaaggtatggctcacacacctggtatgaagtaaacagcacagttcttcaaacatccccagggcagccagacaaaatccacaaaaatgcctctcccttttctgggcatgacagaaacttcattctaagcgtgtgcaatgtttatatgtagacacaacacacatgcatgtgtataaagcaaataaatacatttccctctattgttcatttgatttcacctacttacggctgaagtggaaaacttattaggcctggaaaagcctttcacagccaggaactggaatggtttgggataatttccttcaaatactcatattaagctttatttgtgttaagagaactatttaaaactcatcttaaaaacatcttgtttaaaacaatcttaaaaacaatctaatactaacccagaatgtaacaatctaaattttacttgactattcacaatagaatttaaaagtttcagccaaagttaatatgaattaataactaaaatatcaacaagcattttagttaacagtatctaactcagaccctacaatcagcatctcccataagcaagaaccggggttaggttatgtggaagttacaaagatgagtaaataaaacacagcatccctgtcatcccaggaccaaagggataggagtgaggatgatggaagtagaaacttaaatgtgatgacaataggatagagattgattccaaaaaggcatgggaatctggaaagttctcaaagaaagaatccgaaggtgttaagaaaggcctttggaaggtagaattggagagaacagtatgaacaaggactcagagccagaaaaattgggcgggcatacaggggaaagattttagtggtaatgaggaaacaaggctgggaacacagaccagggccatatcaggtccggcctcagcaggagaaatataagcaatgggaaccatcacactgggtgaaattcaatctttattttaaaagatggtacacaaccatctgccaatttataaacagatgatcaatttatagatttttaaaagtctacattttaataaatgttttacattgtgttcattttattagccattttttgattttcctaaaatctgttacttattaatgatgaatctactccaaaatcttttttttttttttttggagatggagtcatgccgtcacccagactggagtgcagtggcgcgatctcggctcactgcagtctctgcctcctgagttccagcgattctcctgcctcagcctcccgagtagactagctgggattataggcgcacgccaccacgcccagctaatttttgtatttttagtagagacggggtttcatgttgaccaggctggtctcgaactcctgacctcaggtgatccgcctgcctcagccttccaaagtgctgggattacaggcgtgagccactgtgcccggcctctactccaaattctaagtacgatactgttttggttttaaataccatttttggttaaagagccccatttaaattgtttaaatgaaataaatacatccaaagtaaatgcacggtgaaaaatacattttaatccaaaagttttgaatattggcacttagaaagttatttacaatcaattttactataccctttgtgaataaagagataattatgtacgtgtagctacctatagttgtttctttccaactcaaacaccataactatgtggaaaaagggtaagagttaaagctgctgcagctcaaaatcattacaatcaacttagattctgcaaattttcccagggttgaaaaatgctggttaaatcaggacaaaagaggaggcaagtgagtacaccccactcctctcccattttacgtgttgctcccttacttaaccggcaaagacctgcacctgaattctagacaatttcatatacaacaggcctcttattatgggtccatagcagatggtttagggtagatgttttaaagatatcaatgctaatggcctaccaatgactttcatgacctcccaatattcgttttaatggtagtcaagagactatcaagcaggaagcctgatctcgacatgtttcctctgcggctttggtgaagctgactatctgcagtataaaatcttatggtttgatcgaagtctcatttttgactagaaacagtaaagagcagctttattaagatcaatggaatggttctgaatgcctgtttctacagaaggattaaattaaaattttttcttttttttcttttttgagacagtcttgctctatcacccaggctggagtgcagtggcacgatctcggcttactgcaatctccacctcccgagttcaagcaattctcctgcctcagcctcccgagtagctgggattacaggcatgcaccataacacccaactaatttttgtatatttagtagagacagggtttcatcatgttggccaggctggtcctgaactcctgacctcaagtgatccatccactcaggcctcccaaagtgccgggattacaggcatgagccaccgcacgtggcctagatgaaagtttttaaaagcctgggctaataaaatcatccaccaatcatttttcttatggttaaagcagccaaaaagctgtcacagcatttttgagatgagaacataaggcttgtgtggctttatgatagatgctgttagtcattttatttgattaagcccttggtcagtcatctataccttaattaatattttgttcttatagaaaaatacaatccattttatgagtttctagaaataaataatggagaaaaatagatactacctgttcctaatggtctctctggaaattacagcttttgcctaggaagatacacatatagaatataatttaagttcaaaatatatttcattatattctatcccttttaattttttgtttgtttctttgagacggagtcttgctctgtccacccaggctggagtgcagtggcacgatctctgctcactgcaacctccgcctcctgggttcaaccaattctcctgcctcagcctcccgagtagctgggactacaggtgtgcgccaccacacctggctaatttttgtatttttagtagagacagggtttcaccatgctggccaggctggtctcgaactcccaacctcaggcgatccatctgcctcagcctcccaaagtgctgggattaaaggcgtgagccactgtgcccagccttttttttttttttttttttccgagacaagagtctcactctgttgcccaggctggagcacagcggtgcaatcttggctcactacaacctccacctcctgggtttaggcgattctcctgcctcagcctcccaaatagctgggattacaggcacatgccaccacacctggctaatttttgtatttttagtagcgacggggtttcgccatgttggccaggctggtctcgaactcctgacctcaggcgatccacttcccgacctcaggtgatccgcctgcctcggcctctaaaagtgctgcaattacaggcataagccactgtgcctggccctatcccttttaattttctaagtgaccagtaataaacaatgatttgtttattactaggtagcaggagaaaaactttttagtcacttttccagctaagaatttcatttaaagatacctatgacatatcttgtggtactaagaatattagagaactggaaatccagtttttttgtggttttttaagaaagagaatctgactccattgcccagcttggagagcagtggtgcaatagctggggctacaggcgtgagccaccacaccaggcctggaaacccagttttaatttgtgaactacaaatggttggcaactgattccttaattgttattgcaggagtaggcccaacatgagtccatatgtagcccttctctggtctggtgggaactgtgggaaatggtgatgaccgtgacttgaaatactcagaaggtgcatgacaaacaaattccaagtattccatcttccttggaagatcttcctctggccctggaaggcagccaagggaaaggttaaatacatttttgaccatatatatcattttcataagatgttaaaatttctagacactgggagagaccactctgggagcaacctggcattagcccttgaaacatgcattactttgaaattattcttaatcattttttcttctttaacggcttaaagaatatggcattctcccaaaaacagtgattgaacacttgcatcatgtttattttgtacccacactgctctaagtttacatgtatcaataccttcattcctcacatcaaccttctgaggtaggcactattattattcccattttacatatgaggaaagtgaggcaagagagactaagaaacttgccaaagtcacatggccggtaaatggcaggctgtgaacctagacagtctggctccagaactggtgttctgacctcatgccatgctgcctcgctgtaggacaaggatgcatatcagaatctggggattagaaagaggaggcagtagaggaatcccgaaggtgattctgatacatcactgcctctgctgagatcctgatccatagataaggtaaataaaaattctatatacttataagcagaaggctagaattgtttggtaatgtatcaaacttgacatataggtgagaataacagtggtatattatttgtccctggagttctctccaaaaacacacttatgcttgttctcaggatgcaaaagtaatgatgcatgctcactgcagaaagataaaaagtctgaagtaactgtaaaaatctgaaaactttaaaaattgtattaatcagtaaattcttgtgagtctatctcacaactgttttggcagctttgaaattaacaaaagcacagcagctgccatttcaactatcagcctttatactataaaggcctaagatgacatgtgtagcatgcagaggcacacatattgagaatttgcaagtatgggataactgggatagttctttcctaaattatttttgaataggtttgtataaataagtaacctaaataacctagttcctgagcaatacattcttgtagtacagtttaaccctgggtcactccaaaaaaatcttatccataccacttcttagtagatgcacattgctctaactcaaaataactgatagcactcacactccagctacataaaatgcctcatattttctataaagctctctaatttttttgtacttaataatactcatgctttttttgttatggactgaattgcatccccccccgccaccctccaaatttatatgttgaagccctaatccccaatgtgatggtacttggagatgagacctttagggaggcaattaaggttaaatgaaaccataagggtggggccctcatctgacagaaatggtgtccttataagaagatacaccaaagagctctcactccatgaaaggccatgtgaggacacagcaagaaggtgaccatctatatgccaggaagaaaagcctccccagaaatccgtgttgccagcaccttgatgttggacttcagcctccacaactgtgagaaagtgactttctgttgtttaagccactcagtctgtgatattttgtcctgacagcccaagctgactaacacactcttttacataatattggagagttaactaagttaaaaaaaaacctgtgccatttgtcaaacttacctatgatataggaggcgggatcaaattggtctctggggctagagagggtaggaatgagccacgtcagtgctgcactcttctcgcaatactggtcctggataaaacctctgatttgagcatagtagggctttccatcttgttcatcaatcacagaaacaacatcaccaatttggtaatatactccctgggggaaacagaagataatcccacattgaaaataaaaatagaacatcacagctatgaatgaaccttaataggtaagcaagttttcaaagtggtcagtaaaaggtgttcgagatagtctaatgtatcagtgtttatatgtttggtgccaattctaaagttgtttcacgtttgaatgaaaattatacatacacatacgagggtgcatatatgacagtttacatctggagaaaagatttgttcataaagtattttgattttatattgccgtaataccatccccactttttaaaaaatagactttattttttacagaggttttaggtttacagcaaaattgagcagaagtagagagatttcccatatacttcctgcccccacacatgcacatcctcccctattatcaataacccctcccaccactagagtggtacacttgttacacggatgaacgtacactgacatagcatcatcaaagaccagagttcacattagggttcactcttggtgctgtgtattctgtggggttgggcaaatgtataatgacatgtacccaccattatagtatcatacaaagagagtattaatagtttcaccgccctaaaaatcctctgtgctccgtactatccctactttgttagccacagtcatgaagcagtagtaaggttaaacggcttgctgaaagccatagagactgcagccaaagctcctacatcagctcagcagtcttttctctgtactgtcttgaaaatcatgctgatttggtaagaatgcattctacatgccaccctccccaaccatccactcaaagaaaatagataccatgaattcaaaccaaaacaaattcaaaccaaaaataatctttggattatagtcttcaggatatgtttacctcaacctactgtacatctcctagactcactgctgcctttctcttccactcccagttgagttttatatccttccacaacaggactactagtatttctggcattcaaggctttgtgtctcattcatttctgttccactttatacccaactaactaatgtgtacatgtcctgtgttaaatcctccctatgactctggtatccatcctatgtcctcttccctgggtcttgagctggaaataatctctcctctgaacacccataatggttgatccaaatctttatgacatccagcacctccttaagtgggtatagttcttggtaagatatactgtccttgactacgggaacagtgtaattcattgctgcttcccttgaaacagggacttggcagcaggtaaagctgtaggaatgtgtacctcaaccataaaaacacttttgaggaaatacttccagtaactgaactgtaacatagcacctgataggccaggagttttttcctggtggaccctttatccaagtgtctgagggtggctgtttcatctggatcactacggatgggtctggtctatgcaggccacagtccgctacttgctagttcctacccatcaatagctggtccttcctcccagccatcagtccaaagttatttatcatataaatagtttgcatttatggtttgtttgtccacatgtataatcaatattcccaaattctaaatgagaatacttgcttatcataggcttactatgcataacacagcatattcaaatgtatgctgaatgaatatgaatccaaaacatctactttcatagtgtaaaggcagaaatgcaaagtaaaaacaatgtcttagtgaaagattccagtggtaggcagtgcctggcacatagtaggtatttattaatatgtgctgtgttgtgtacacatatataacaccaaacaggactaagtcactgatctgagtagtctcctcatttgctgagaggattcaaggtttctggtagagaaaaggggtccacacgagaacagcactagtttaggcatcaccagatctgagttcatggagttgttctgccactgccatgctccagggaggccactcagccattctgggtcttgggtggtcacactcttggccgtgatccccagtggctcccactcaggctcctcttgcatgcctgatctgggctctagctcagtggctggcagtgacctcttgaacttgccaccatggtgctgcctgccagtggcactgctgtgatagccactacaatactgggcatttgcaacattacttgactactttgttgcattattgtccttatcatttaataaacatgggtggcagacaacaatacgaaagtacagacagtcacaataacaggtcccacacacccttccatggagacacacatggaaactgttagtacactaaacccgtagctcaacaagttgcttctggccttaatctgtaaactgtgaaggtaatgcacaaatacgaagatgtgataactcctactattcattgagtgcttactctgctaagtgcttaacacatatgatttcatttgacccactgaggtagtaactatttacaattcctattttacagatgagacattagagaggttggtcctcgtcacatagccagtcacttgctaaagctgtagagccaggaactatgctctaggcttaagctctggcatgagactgcctcactccatgacttgttggctatgtgatcttggacaagttaattaacctcgctgtgcctcaatgttctcatctagaaaatggggatagtagtatccacctcatagagtgaactgaatgaaataaagcatgcaaaatgctcagccactgatacacagcaactgtttgctaaactttagatattttattaacaatgtattaaatgttggaaaaataagagagatgtttgcctgtgtacagactttttttgttgttggtttttcccagccctgctgaggaatgccagtgtacccctgttgggaggaacagacttcgactatatagattgtgggcttaaaaaaaagtatacttaagggcatcatcacttgagtttctcagtccacctgggtcaagtataaagtactaactcacaccactgtcccctaaatgacagttcagatcccgaaacaccaaatagccttcaatggttgctgcctgtgccgtgccaggcctgccgagccttgggggtctatgttctaattcctttcctaagacttctggtttaaacacaacaatctgtcacttctctcactgaggtatcagatgttcatggactttggccctgggaaacctgacctcctcattcttttatcaaaacatcttggaattcctctcactatgaatttctagtaggtgttaatcctcactactgcccttactcagctcaactccacttaaaggcattttagaatctctgggcctactctacccatttgacaccacagtcgacaacctctactagtccaaatcctgtctctgtccttctcattcttcaatgccatcgcactaacggctcagtcttccatggctccacactatacaatcagcattttaagaataattcctacaatctacactaaaaaaaaatacttaagatcctcacatcatgtgtcagtaggcactttctcctcccacttcagctctagatgagatgttttaataacagccacttatgggggaaaacagctaagaagggaacaaaaagtataatcacaccttatacaaataaagagtagcagagacctttagactaatccaacattttagtggcacattacccactaggcccaactcttccttcagtaactctacaaaagcttaccttgtagaagattgattctgcagtgattatagtggaaactgactcaggagctttgatgggctatgaaaatacaaaaaacattagcacattcatagtatgtatgtgtctacaggcattttcccagccctatgagagttctgcaatttgagaagtactaaaatgtattgtttggtgacaagaactgcaataaaaagataaatgattttctgaatgttgtggcaaagcagtctatttccactgcaatttctgctactattagcttaaaaattgctgagacaaaggacaaccttctgattatgctgctgagatctaatgcaaagtcctctcagagcttcactacacataaacattccagttataaaaatgtacctgctctaatagcctgagcatgacagaatgcaagtaacagaaaatgtacagatgaatacaaagtgaaaaagtgtctcctcaaagacatttcccaactcaactatggaactagccataatactcaacataggttttctagcaagctgaaactaaggctttagaaactttgagagttcttagtaatttgctaccatccaaccatttttgagatctctactaaagctt

SEQ ID NO: 82 - DNA, 2333 bp, Homo sapiens
acgagcagcgacgcccctggtcccacagataccactgcctcccgccctttcgctcctcggccgcgcaatgggcacccgcgacgacgagtacgactacctctttaaagttgtccttattggagattctggtgttggaaagagtaatctcctgtctcgatttactcgaaatgagtttaatctggaaagcaagagcaccattggagtagagtttgcaacaagaagcatccaggttgatggaaaaacaataaaggcacagatatgggacacagcagggcaagagcgatatcgagctataacatcagcatattatcgtggagctgtaggtgccttattggtttatgacattgctaaacatctcacatatgaaaatgtagagcgatggctgaaagaactgagagatcatgctgatagtaacattgttatcatgcttgtgggcaataagagtgatctacgtcatctcagggcagttcctacagatgaagcaagagcttttgcagaaaagaatggtttgtcattcattgaaacttcggccctagactctacaaatgtagaagctgcttttcagacaattttaacagagatttaccgcattgtttctcagaagcaaatgtcagacagacgcgaaaatgacatgtctccaagcaacaatgtggttcctattcatgttccaccaaccactgaaaacaagccaaaggtgcagtgctgtcagaacatctaaggcatttctcttctcccctagaaggctgtgtatagtccatttcccaggtctgagatttaaatatatttgtaattcttgtgtcacttttgtgttttattacttcatacttatgaatttttccatgtcctaagtcttttgattttagctttataaaatcatccacttctcccgaatgactgcagctttttttcatgctatggcttcactagccttagtttaataaactgaatgtttggattcctcagttattgtttacttttcatcatggaagcctgtcactgtatgtaggacataatagaacttatcacttgaagctcagcctattggtcttgatcaaatcaaactaagaagaccttagaaataagctaccattttgccacagagcagcttataggtaatacactcttctctcagtgcagtgtacatttccacaaatctaagaattgccctataaacatagcagggattttgagagcttgaaaattttccattattctggacatgaatttctaaaatgccttaataggtttatgtagttgagtaaattttgttttttaatttttgtaagcatcaaagttgattagagaggggggcactttttctggagaattctcttagtaaacacaaaagattgttacggtttcattagtagtatggttgtggggccataagttaaacagtgctgcctggtaggctgggaactgaagagacttgtggtattccatctcgggtgcctctgttggcaatgatcaggcagcccaaaagatttaaatgatctataataatttccaagcggtagattatgtggcattttattgctcaggcaataattggtttaatgctggtagtgtcaaattttgaagtgttaattttgtcttaggaccttccagtaagtgaaatacaacctagttttatcaccatatccaccagcaggcatccataattattttaacaatgctaatatttgagttttgcagtatattatagaataatatagtccagttaaatctttggtttcagtatgtctgaagagtacagtgagaggttaattttctgctcaagtggtaccacttaaaggcatgtattcttttagtatgtaaaatgaaatagtaccttgagtttaaatagaatgcatttaggcattgtagagatctgaaatagttttcttccactgcgttgttgaaatcaatgaagcaattagtttctcattcagaaatgtgcacactaatatttagttttgctttctcgtggataatattaagcacttactctgcagtttctggaagttgtgtcaactgcagtgatactattcaggatggtgggaaatccccaaaaatatgtatcttttggcttgcttagattactatatttcatagttaatcttttgtctcttgcggtgctcatgatgtgtggggcacacggaaggcattgctgtagtcagtcattttggttttcttctatagccattttattattttagtgtattagttatgaagataatattatctatttgtaaattgctactttgtattttatgcatgctctgtaatttgatttttttttagttattgatttggattatattcacattctaataaacagttatagggggatt

SEQ ID NO: 83 - DNA, 1527 bp, Homo sapiens
  misc_feature (1)...(1527): n=a,t,g or c
ggcgaggaggctgcgagcgagccggaaccgagcgggcggcgggcgccgcacctatgggggagaaacccgggaccagggtcttcaagaagtcgagccctaactgcaagctcaccgtgtacttgggcaagcgggacttcgtagatcacctggacaaagtggaccctgtagatggcgtggtgcttgtggaccctgactacctgaaggaccgcaaagtgtttgtgaccctcacctgcgccttccgctatggccgtgaagacctggatgtgctgggcttgtccttccgcaaagacctgttcatcgccacctaccaggccttccccccggtgcccaacccaccccggccccccacccgcctgcaggaccggctgctgaggaagctgggccagcatgcccaccccttcttcttcaccataccccagaatcttccatgctccgtcacactgcagccaggcccagaggatacaggaaaggcctgcggggtagactttgagattcgagccttctgtgctaaatcactagaagagaaaagccacaaaaggaactctgtgcggctggtgatccgaaaggtgcagttcgccccggagaaacccggcccccagccttcagccgaaaccacacgccacttcctcatgtctgaccggtccctgcacctcgaggcttccctggacaaggagctgtactaccatggggagcccctcaatgtaaatgtccacgtcaccaacaactccaccaagaccgtcaagaagatcaaagtctctgtgagacagtacgccgacatctgcctcttcagcaccgcccagtacaagtgtcctgtggctcaactcgaacaagatgaccaggtatctcccagctccacattctgtaaggtgtacaccataaccccactgctcagcgacaaccgggagaagcggggtctcgccctggatgggaaactcaagcacgaggacaccaacctggcttccagcaccatcgtgaaggagggtgccaacaaggaggtgctgggaatcctggtgtcctacagggtcaaggtgaagctggtggtgtctcgaggcggggatgtctctgtggagctgccttttgttcttatgcaccccaagccccacgaccacatccccctccccagaccccagtcagccgctccggagacagatgtccctgtggacaccaacctcattgaatttgataccaactatgccacagatgatgacattgtgtttgaggactttgcccggcttcggctgaaggggatgaaggatgacgactatgatgatcaactctgctaggaagcggggtgggaaagaagggaggggatggggttgggagaggtgagggcaggattaagatccccactgtcaatgggggattgtcccagcccctcttcccttcccctcacctggaagcttcttcaaccaatcccttcacactctctcccccatccccccaagatacacactggaccctctcttgctgaatgtgggcattaattttttgactgcagntctgcttctccagccccgccgtgggtgg

SEQ ID NO: 84 - DNA, 379 bp, Homo sapiens
catatatagaaagctatttatttcctatagaaaactcaaaaacaaagaaaaagaaagaaaaataaagagagatagaaagagaaagggaaagaaagagagagaaaaaacaaacacacaaaaggtggtctttccccaaaaggcaggcagttgacgggaggacatgtagttgctggmgtgsgaaacagtaacattcagttaacaatggaatatttaaaaaaaaatagttttcttttcaaattgtaacttgtggtaaaacatagaaaaatgtactaaacgagcttgtataaaacagtaaaattttcaaataagcccaggggaaaagcacaatgctggaaagtctctctctctctctctctctctctctctctctctctctctc

SEQ ID NO: 85 - DNA, 3388 bp, Homo sapiens
aattcggagaacctgctacaggaacagctgcaggcagagacagagctgtatgcagaggctgaggagatgcgggtgcggctggcggccaagaagcaggagctggaggagatactgcatgagatggaggcccgcctggaggaggaggaagacaggggccagcagctacaggctgaaaggaagaagatggcccagcagatgctggaccttgaagaacagctggaggaggaggaagctgccaggcagaagctgcaacttgagaaggtcacggctgaggccaagatcaagaaactggaggatgagatcctggtcatggatgatcagaacaataaactatcaaaagaacgaaaactccttgaggagaggattagtgacttaacgacaaatcttgcagaagaggaagaaaaggccaagaatcttaccaagctgaaaaacaagcatgaatctatgatttcagaactggaagtgcggctaaagaaggaagagaagagccgacaggagctggagaagctgaaacggaagctggagggtgatgccagcgacttccacgagcagatcgctgacctccaggcgcagatcgcagagctcaagatgcagctggccaagaaggaggaggagctgcaggcggccctggccaggcttgacgatgaaatcgctcagaagaacaatgccctgaagaagatccgggagctggagggccacatctcagacctccaggaggacctggactcagagcgggccgccaggaacaaggctgaaaagcagaagcgagacctcggcgaggagctggaggccctaaagacagagctggaagacacactggacagcacagccactcagcaggagctcagggccaagagggagcaggaggtgacggtgctgaagaaggccctggatgaagagacgcggtcccatgaggctcaggtccaggagatgaggcagaaacacgcacaggcggtggaggagctcacagagcagcttgagcagttcaagagggccaaggcgaacctagacaagaataagcagacgctggagaaagagaacgcagacctggccggggagctgcgggtcctgggccaggccaagcaggaggtggaacataagaagaagaagctggaggcgcaggtgcaggagctgcagtccaagtgcagcgatggggagcgggcccgggcggagctcaatgacaaagtccacaagctgcagaatgaagttgagagcgtcacagggatgcttaacgaggccgaggggaaggccattaagctggccaaggacgtggcgtccctcagttcccagctccaggacacccaggagttgcttcaagaagaaacccggcagaagctcaacgtgtctacgaagctgcgccagctggaggaggagcggaacagcctgcaagaccagctggacgaggagatggaggccaagcagaacctggagcgccacatctccactctcaacatccagctctccgactcgaagaagaagctgcaggactttgccagcaccgtggaagctctggaagaggggaagaagaggttccagaaggagatcgagaacctcacccagcagtacgaggagaaggcggccgcttatgataaactggaaaagaccaagaacaggcttcagcaggagctggacgacctggttgttgatttggacaaccagcggcaactcgtgtccaacctggaaaagaagcagaggaaatttgatcagttgttagccgaggagaaaaacatctcttccaaatacgcggatgagagggacagagctgaggcagaagccagggagaaggaaaccaaggccctgtccctggctcgggcccttgaagaggccttggaagccaaagaggaactcgagcggaccaacaaaatgctcaaagccgaaatggaagacctggtcagctccaaggatgacgtgggcaagaacgtccatgagctggagaagtccaagcgggccctggagacccagatggaggagatgaagacgcagctggaagagctggaggacgagctgcaagcctcggaggacgccaaactgcggctggaagtcaacatgcaggcgctcaagggccagttcgaaagggatctccaagcccgggacgagcagaatgaggagaagaggaggcaactgcagagacagcttcacgagtatgagacggaactggaagacgagcgaaacgaacgtgccctggcagctgcagcaaagaagaagctggaaggggacctgaaagacctggagcttcaggccgactctgccatcaaggggagggaggaagccatcaagcagctacgcaaactgcaggctcagatgaaggactttcaaagagagctggaagatgcccgtgcctccagagatgagatctttgccacagccaaagagaatgagaagaaagccaagagcttggaagcagacctcatgcagctacaagaggacctcgccgccgctgagagggctcgcaaacaagcggacctcgagaaggaggaactggcagaggagctggccagtagcctgtcgggaaggaacgcactccaggacgagaagcgccgcctggaggcccggatcgcccagctggaggaggagctggaggaggagcagggcaacatggaggccatgagcgaccgggtccgcaaagccacacagcaggccgagcagctcagcaacgagctggccacagagcgcagcacggcccagaagaatgagagtgcccggcagcagctcgagcggcagaacaaggagctccggagcaagctccacgagatggagggggccgtcaagtccaagttcaagtccaccatcgcggcgctggaggccaagattgcacagctggaggagcaggtcgagcaggaggccagagagaaacaggcagccaccaagtcgctgaagcagaaagacaagaagctgaaggaaatcttgctgcaggtggaggacgagcgcaagatggccgagcagtacaaggagcaggcagagaaaggcaatgccagggtcaagcagctcaagaggcagctggaggaggcagaggaggagtcccagcgcatcaacgccaaccgcaggaagctgcagcgggagctggatgaggccacggagagcaacgaggccatgggccgtgaggtgaacgcactcaagagcaagctcagagggccccccccacaggaaacttcgcagtgatgcaccaggcgaggaaacgagacctctttcgttccttctagaaggtctggaggacgtagagttattgaaaatgcagatggttctgaggaggaactggacactcgagacgcagacttcaatggaaccaaggccagtgaataagcaactttctacagttttgcaccacggcaagaaaaccaaaaaccaaaacaaacaaacaaaaaaaacccaacaacaacccgaacaagac

SEQ ID NO: 86 - DNA, 1487 bp, Homo sapiens
cgaaacagtagaggtgacagagcagccgtgctcgaagcgttcctggagcccaagctctcctccacaggtgaagacagggccagcaggagacaccatggggcacctctcagccccacttcacagagtgcgtgtaccctggcaggggcttctgctcacagcctcacttctaaccttctggaacccgcccaccactgcccagctcactactgaatccatgccattcaatgttgcagaggggaaggaggttcttctccttgtccacaatctgccccagcaactttttggctacagctggtacaaaggggaaagagtggatggcaaccgtcaaattgtaggatatgcaataggaactcaacaagctaccccagggcccgcaaacagcggtcgagagacaatataccccaatgcatccctgctgatccagaacgtcacccagaatgacacaggattctacaccctacaagtcataaagtcagatcttgtgaatgaagaagcaactggacagttccatgtatacccggagctgcccaagccctccatctccagcaacaactccaaccctgtggaggacaaggatgctgtggccttcacctgtgaacctgagactcaggacacaacctacctgtggtggataaacaatcagagcctcccggtcagtcccaggctgcagctgtccaatggcaacaggaccctcactctactcagtgtcacaaggaatgacacaggaccctatgagtgtgaaatacagaacccagtgagtgcgaaccgcagtgacccagtcaccttgaatgtcacctatggcccggacacccccaccatttccccttcatacacctattaccgtccaggggcaaacctcagcctctcctgctatgcagcctctaacccacctgcacagtactcctggcttatcaatggaacattccagcaaagcacacaagagctctttatccctaacatcactgtgaataatagtggatcctatacctgccacgccaataactcagtcactggctgcaacaggaccacagtcaagacgatcatagtcactgagagacagaatctcaccatgttgcccgggctggactcgaactcctgggctcaagcaatcctcccatctgtttcccaaagtgctgagattacagataatgctctaccacaagaaaatggcctctcacctggggccattgctggcattgtgattggagtagtggccctggttgctctgatagcagtagccctggcatgttttctgcatttcgggaagaccggcagggcaagcgaccagcgtgatctcacagagcacaaaccctcagtgtccaaccacactcaggaccactccaatgacccacctaacaagatgaatgaagttacttattctaccctgaactttgaagcccagcaacccacacaaccaacttcagcctccccatccctaacagccacagaaataatttattcagaagtaaaaaagcagtaatgaaacg

SEQ ID NO: 87 - DNA, 2416 bp, Homo sapiens
gaacagtgttaccttggagcctacaatgagaggtatttcaaaatgagtgaagcatgactctcacagatgaaggcctagacgcaggatctttaatggaaaaacacttgggccacttcaagacgacaaacgctcactgggcaaaacaccttcactgaaaagagacctcatattatgcaaaaaaaatcttaagaggcctctgccttcagaagttacaagatgatcaattcaacctccacacagcctccagatgaatcctgctctcagaacctcctgatcactcagcagatcattcctgtgctgtactgtatggtcttcattgcgggaatcctactcaatggagtgtcaggatggatattcttttacgtgcccagctctaagagtttcatcatctatctcaagaacattgttattgctgactttgtgatgagcctgacttttcctttcaagatccttggtgactcaggccttggtccctggcagctgaacgtgtttgtgtgcagggtctctgccgtgctcttctacgtcaacatgtacgtcagcattgtgttctttgggctcatcagctttgacaggtattataaaattgtaaagcctctttggacttctttcatccagtcagtgagttacagcaaacttctgtcagtgatagtatggatgctcatgctcctccttgctgttccaaatattattctcaccaaccagagtgttagggaggttacacaaataaaatgtatagaactgaaaagtgaactgggacggaagtggcacaaagcatcaaactacatcttcgtggccatcttctggattgtgtttcttttgttaatcgttttctatactgctatcacaaagaaaatctttaagtcccaccttaagtcaagtcggaattccacttcggtcaaaaagaaatctagccgcaacatattcagcatcgtgtttgtgttttttgtctgttttgtaccttaccatattgccagaatcccctacacaaagagtcagaccgaagctcattacagctgccagtcaaaagaaatcttgcggtatatgaaagaattcactctgctactatctgctgcaaatgtatgcttggaccctattatttatttctttctatgccagccgtttagggaaatcttatgtaagaaattgcacattccattaaaagctcagaatgacctagacatttccagaatcaaaagaggaaatacaacacttgaaagcacagatactttgtgagttcctaccctcttccaaagaaagaccacgtgtgcatgttgtcatcttcaattacataacagaaatcaataagatatgtgccctcatcataaatatcatctctagcactgccatccaatttagttcaataaaattcaaatataagtttccatgcttttttgtaacatcaaagaaaacatacccatcagtaatttctctaatactgacctttctattctctattaataaaaaattaatacatacaattattcaattctattatattaaaataagttaaagtttataaccactagtctggtcagttaatgtagaaatttaaatagtaaataaaacacaacataatcaaagacaactcactcaggcatcttctttctctaaataccagaatctagtatgtaattgttttcaacactgtccttaaagactaacttgaaagcaggcacagtttgatgaagggctagagagctgtttgcaataaaaagtcaggtttttttcctgatttgaagaagcaggaaaagctgacacccagacaatcacttaagaaaccccttattgatgtatttcatggcactgcaaaggaagaggaatattaattgtatacttagcaagaaaattttttttttctgatagcactttgaggatattagatacatgctaaatatgttttctacaaagacttacgtcatttaatgagcctggggttctggtgttagaatatttttaagtaggctttactgagagaaactaaatattggcatacgttatcagcaacttcccctgttcaatagtatgggaaaaataagatgactgggaaaaagacacacccacaccgtagaacatatattaatctactggcgaatgggaaaggagaccattttcttagaaagcaaataaacttgatttttttaaatctaaaatttacattaatgagtgcaaaataacacataaaatgaaaattcacacatcacatttttctggaaaacagacggattttacttctggagacatggcatacggttactgacttatgagctaccaaaactaaattctttctctgctattaactggctagaagacattcatctatttttcaaatgttctttcaaaacatttttataagtaatgtttgtatctatttcatgctttactgtctatatactaataaagaaatgttttaatactg

SEQ ID NO: 88 - DNA, 3900 bp, Homo sapiens
ctaggcctgggactcctgggtccccggcagtgtctggaggcatggctggggctggcgggggcctcggggtctgggggaacctggtgctgctgggcctgtgcagctggacaggggccagggcgcctgcccccaacccagggaggaacctgacagtggagactcagaccaccagctccatctccctgagctgggaggtccccgatggcctagactcacagaactccaactactgggttcagtgtactggagacggcggcacaacagagactcgaaacacaacagccaccaacgtcaccgtggatggccttggacccgggtcattgtatacgtgttctgtgtgggtggagaaagacggagtaaatagctctgtggggactgtcactactgccacagctcccaacccagtgaggaacctgagagtggaggctcagaccaacagctccatcgccctgacctgggaggtccccgacggcccagacccacagaactccacctacggggttgagtacactggagatggtggcagagcagggactcgaagcacagcacacactaacatcaccgtggatggacttgaacccgggtgtttgtatgcgttttccatgtgggtgggaaagaatggaatcaacagctcccgggagactcgaaatgccaccacagctcacaacccagtgaggaaacctgagagtggaggctcagaccaccagctccatctccctgagctgggaggtccccgatggcacagacccacagaactcgacctactgcgtacgagtgcactggagatggtggcagaacagagactcgaaacacaacagacaccagagtcaccagtggatggccttggacccgggtcattgtatacgtgttctgtgtgggtggagaaagacggagtaaatagctcctcgtggagattggtaactagtaccacagctcccaacccagtgagaaacctgacagtggaggctcagaccaacagctccatcgccctgacctgggaggtccccgatggcccagacccacagaactccacctacggggttgagtacactggagatggtggcagagcagggactcgaagcacagcacacaccaacatcaccgtggatagacttgaacccgggtgtttgtatgtgttttccgtgtgggtggggaagaatggaatcaacagctcccgggagactcgaaatgccaccacagcccccaacccagtgagaaacctccatatggagactcagaccaacagctccatcgccctatgctgggaagtccccgatggcccataccctcaggactacacctactgggtagggtacactggagacggtggtggcacagagacccgaaacacaacaaataccagtgtgacagctgagagacttgagcccggaaccttgtacacattctctgtatgggcagaaaaaaatggagcacgtggctccaggcagaatgtcagcatctccacagtccccaacgcagtgacaagcctcagcaagcaggactggaccaacagcaccattgctttgcgctggacagctccccagggcccaggccagtcttcctacagctactgggtctcatgggtcagggaaggcatgactgaccccaggacccaaagcacctcaggtactgacatcaccctaaaggaactggaagctggcagcctgtaccacctcaccgtctgggccgagaggaatgaggtcagaggctataacagcaccctcactgcagccactgctcccaatgaggtcacagatctccagaatgaaactcagactaagaactcagtcatgctgtggtggaaggcccctggagacccccactctcagttgtacgtatactgggtccagtgggccagcaagggacatccccggagggggcaagatccccaagcgaattgggtcaaccagaccagcaggaccaatgagacgtggtacaaagtggaggccctggaacccgggacgttgtacaatttcaccgtgtgggcagagaggaatgacgtagccagttccacgcagagcctctgtgcgtccacatacccagacacagtcaccatcacttcctgtgtcagcacctcagcgggctatggagtcaacttgatctggtcctgcccccagggaggctacgaggcctttgagttggaggtgggaggacagcggggctcccaggacagatcttcatgtggggaggctgtgtctgtgttgggtctcgggccggctcggtcctacccagccaccatcacgaccatctgggacggaatgaaggtcgtgtctcactctgtggtctgccacaccgagagtgcaggggtcattgccggagcctttgtgggcatcctcctgtttctcatcctcgtgggcctgctgattttcttcctgaagaggaggaataagaagaagcagcagaaaccagaactcagggatctggtctttagctccccaggggacatcccagctgaagacttcgctgaccacgtcaggaagaatgagagggacagcaactgtggttttgcagacgagtaccagcaactctccctggtgggccacagccagtctcagatggtggcttcggcttcagagaacaacgccaagaaccgctacagaaatgtgctgccctatgactggtcccgggtgcccctgaagcccatccatgaggagccaggctctgactacatcaatgccagcttcatgcccggtctctggagcccccaggagttcattgcaacccagggtcccctgccacagacagtgggtgacttctggcgcctggtgtgggaacagcagagccacaccctggtcatgctgaccaactgcatggaggccggccgggtgaagtgtgagcattactggcctctggactcgcagccctgcacccatgggcacctgcgggtaaccctggtaggtgaggaagtgatggagaactggacggtgcgggaactgctgctcctccaggtggaggagcagaagacactgtctgtgcgccaattccactaccaggcctggccggatcacggcgttccctcctccccagacaccttgctggctttctggaggatgcttcggcagtggctggatcagaccatggagggaggcccacccattgtgcactgcagtgctggcgtgggtcgcacaggaaccctcattgccctggacgtcctgctccggcagctgcagtccgagggtctccttgggcccttcagctttgtaaggaagatgagagagagtcggccgttgatggtgcagactgaggctcagtacgtattcctgcatcagtgcatctgcggttcctccaacagtcagcccaggccccagccgagaaggaagtcccgtatgaggatgtcgaaaacctcatctacgagaacgtggccgccatccaggcccacaagttggaggtctaagtgacgagggggctgggtcggcagcccaggcatcctcaagctctggacacccacttgagcccagattcctggaagagcagagggctgggctcccagactcctgggtgctgtgggaggagggggctggtatcccaaactctggtttccccaggagagagtggtctggtgggcttcagatgagtcctatgggagctggggatctggattcctggttccctgaaggaggagagggatgatagcttggattccctaggtctttccaggatgcagaaagaaacaggctggggcctggattctgaggcaggaaggaatttgggtctggagttctggctacttgaggaccaaaggcaggaaggatcctgccttgattttacttcagaaaccaaatcagtcttctataatctggggtcggagggagtccctgtgcccaaggtctctctgcaccccaccatccacatgtatttttccttctatcccataatttattaaatcactgttctccccag

SEQ ID NO: 89 - DNA, 1486 bp, Homo sapiens
caaatcttccaaagaatcctctaagaaacccaaagaaaataaaccactgaaagaagagaaaatagttcctaagatggccttcaaggaacctaaacccatgtcaaaagagccaaaaccagatagtaacttactcaccatcaccagtggacaagataagaaggctcctagtaaaaggccgcccatttcagattctgaagaactctcagccaaaaaaaggaaaaagagtagctcagaggctttatttaaaagtttttctagcgcaccaccactgatactcacttgttctgctgacaaaaaacagataaaagataaatctcatgtcaagatgggaaaggtcaaaattgaaagtgagacatcagagaagaagaaatcaacgttaccgccatttgatgatattgtggatcccaatgattcagatgtggaggagaatatatcctctaaatctgattctgaacaacccagtcctgccagctccagctccagctccagctccagcttcacaccatcccagaccaggcaacaaggtcctttgaggtctataatgaaagatctgcattctgatgacaatgaggaggaatcagatgaagtggaggataacgacaatgactctgaaatggagaggcctgtaaatagaggaggcagccgaagtcgcagagttagcttaagtgatggcagcgatagtgaaagcagttctgcttcttcacccctacatcacgaacctccaccacccttactaaaaaccaacaacaaccagattcttgaagtgaaaagtccaataaagcaaagcaaatcagataagcaaataaagaatggtgaatgtgacaaggcatacctagatgaactggtagagcttcacagaaggttaatgacattgagagaaagacacattctgcagcagatcgtgaaccttatagaagaaactggacactttcatatcacaaacacaacatttgattttgatctttgctcgctggacaaaaccacagtccgtaaactacagagttacctggaaacatctggaacatcctgaggatataacaactggatgcatcaagaactattgtgttttttttttttggttttttttttttttggttgtgattttttgttcttgttgtttatatgaaaacactcaaaatgatgcaaccaaaagggaaaaaataaaaatcaaacaaccttcagctttatttttctttaaagccagtcatcatctcttgataaaggagaggttaaagcaaaccagcctcagcggaccactcttctctccaaggaaatccccgggaagagttagcctggatagccttgaaaacaaacaaatcaaacacaacacaagaaaactcaaagaatgtgtatggtatcatgtatctctctgtggtggttcattccacaggacgaatgcatattcaacacactgccttattacataactgatctatttattatcgcatacagatattctaagtcgttgagggaatgacaccatcag

SEQ ID NO: 90 - DNA, 257 bp, Homo sapiens
  misc_feature (1)...(257): n=a,t,g or c
gatcnnggctaagccagccagcccncccgcgccaggnaaaacagggctgcaggtgtcctgtctcccagcctcatctggccggcctccccaaacatttgcctgtccatcagctcttcctcctttcgagtcatgtggaaagggacaggnccaagtggccttggtgtttaaatcttgccctaaattgtaactcacatgattatttaaagtcactaganataagtaagcacagcaataaagntttaatggaataaaagaaa

SEQ ID NO: 91 - DNA, 251 bp, Homo sapiens
gatccgcccacttcagcctctcaaagtcagggattacaggtgtgagccactgtgcccggcctcctcagtccatttttaatactgaaggtataaattgtataaagatgtttagaaagttctaattcattttatgcatttttgcaaatttgactccatgaaagtgcattatcacgaagctgaatttgtgtaagcattgtgcatgtatgtaaaaacattgcaacttcctcaataaaatatcttctttttgtaaa

SEQ ID NO: 92 - DNA, 9517 bp, Homo sapiens
gttgctgtcggagagagaaagccgcacccgagaggaggtgtgggtgttccgcttccatcctaacggaacgagctccctcttcgcggacatgggattacccagcggctgctaacccctctcctcgccctgctcccccaaaccggcgtggctccccgggcaccaaggagctgactacagaggagcaggatttgcacccctcgctgggcttgctttggcaacagagtgcctgacccaggtcaggattttcaagaaagacatgtctgacaaaatgtctagcttcctacatattggagacatttgttctctgtacgcggagggatcgacaaatggatttattagcaccttgggcctggttgatgatcgttgtgttgtacagccagaaaccggggaccttaacaatccacctaagaaattcagagactgcctctttaagctatgtcccatgaaccgctactctgcccaaaagcagttctggaaagccgctaagcctggggccaacagcaccacagacgcagtgctactcaacaaactgcaccacgctgcagacttggaaaagaagcagaatgagacagaaaacaggaaattgctggggaccgtaatccagtatggcaatgtgatccagctcctgcatttgaaaagtaataaatacctaacagtgaataagaggcttcctgctctgttggagaagaatgccatgagagtcacattggacgaggctggaaatgaagggtcctggttttatattcagccattctacaagctgcgatccattggagacagcgtggtcataggtgacaaggtggttctgaaccccgtcaatgctggtcagcccctacatgctagcagccatcaactggtagataacccaggctgcaatgaggtcaattccgtcaactgcaatacaagctggaaaatagtccttttcatgaaatggagtgataacaaagacgacatattaaaggggggtgacgtggtgaggctgtttcatgctgagcaggagaagtttctcacctgtgacgaacacaggaagaagcagcacgtcttcctgagaaccacgggccggcagtcggccacatctgccaccagttcaaaagccctgtgggaggtggaggtggtccagcatgacccatgtcggggcggagcagggtattggaacagccttttccgtttcaagcatctggccacggggcattacttggcagcagaggtggaccctgatcaggacgcctctcgaagtaggttgcggaatgcccaagaaaagatggtatactccctggtctctgtgcctgaaggcaatgacatctcctccattttcgagctagatcccaccactctgcgtggaggtgacagccttgtcccaaggaactcttatgttcggctcagacacctatgtactaatacctgggttcacagcacaaatattcctattgacaaggaagaagaaaagcccgtgatgctgaaaattggcacctctcctgtgaaggaggataaggaagcatttgccatagttccggtttctcctgctgaagttcgggacctggactttgccaatgatgccagcaaggtgctgggctccattgctgggaagctagagaagggcaccatcacccagaatgaaaggaggtctgtaaccaagctgctagaagatttggtttacttcgtcactggtggaactaattctggtcaagatgttctcgaagttgtcttctccaagcccaacagagaacggcagaaactgatgagagaacagaatattctcaagcagatcttcaagttgttacaagccccattcacagactgcggtgatggcccaatgcttcggctggaagagctcggggaccagcggcacgctcctttcagacacatctgccggctctgctacagggtgctgagacactcgcagcaagactacaggaagaaccaggagtatatagccaagcagtttggcttcatgcagaagcagattggctatgatgtgttggctgaagacactatcactgccctgctccacaataatcggaaactcctggaaaaacacattaccgcggcagagattgacacatttgtcagcctggtgcgaaagaacagggagcccagattcttagattacctctccgacctctgtgtctccatgaacaaatcaattccagtgacccaggaactgatatgtaaagctgtgctgaaccccaccaacgctgacatcctgattgagaccaaattggttctttctcgttttgaatttgaaggtgtctcttccactggagagaatgctctggaggcaggagaagacgaggaagaggtgtggctgttttggagggacagcaacaaagagattcgcagcaagagtgtgagggaattggctcaggatgctaaagaagggcagaaggaggaccgagacgttctcagctactacagatatcagctgaacctctttgcgaggatgtgtctggaccgccaatacctggccatcaacgaaatctcaggccagctggatgtcgatctcattctccgctgcatgtctgacgagaacctgccctatgacctcagggcgtccttctgccgcctcatgcttcacatgcatgtggaccgagatccccaggaacaagtcacccccgtgaaatatgcccgcctctggtcggagattccctcggagatcgccattgacgactatgatagtagtggagcttccaaagatgaaattaaggagagatttgctcagaccatggagtttgtggaggagtatttaagagatgtggtttgtcagaggttccctttctctgataaagagaagaataagcttacgtttgaggttgtaaatttagctaggaatctcatatactttggtttctacaacttctctgaccttctccgattaactaagatccttctggccatattggactgtgtacatgtgacaacaatcttccccattagcaagatggcgaaaggagaagagaataaaggcagtaacgtgatgagatctattcatggcgtgggagagctgatgacccaggtggtgctccggggaggaggctttttgcccatgactcccatggctgctgcccctgaaggcaatgtgaagcaggcagagcctgagaaggaggacatcatggtcatggacaccaagctgaagatcattgagatactccagtttattttgaatgtgaggttggattataggatctcctgcctcctgtgtatatttaagcgagagtttgatgaaagcaattcccagacttcagaaacatcctccggaaacagcagccaagaagggccaagtaatgtaccaggtgctcttgactttgaacacattgaagaacaagcagaaggcatctttggaggaagtgaggagaacaccccactggacttggatgaccacggcggcagaacctttctccgtgtcctgctccacttgacgatgcatgactacccacccctggtgtcaggggccctgcagctcctcttccggcacttcagccagaggcaggaggtgctccaggccttcaaacaggttcaactgctggttaccagccaagatgtggacaactacaaacagatcaaacaagacttggatcaactgaggtccatcgtggaaaagtcagagctttgggtgtacaaagggcagggccccgatgagactatggatggtgcatctggagaaaatgaacataagaaaacggaggagggaaataacaagccacaaaagcatgaaagcaccagcagctacaactacagagtggtcaaagagattttgattcggcttagcaaactctgtgttcaagagagtgcctcagtgagaaagagcaggaagcagcaacagcgtctgctccggaacatgggcgcgcacgccgtggtgctggagctgctgcagattccctatgagaaggccgaagataccaagatgcaagagataatgaggttggctcatgaatttttgcagaatttctgcgcaggcaaccagcagaatcaagctttgctacataaacacataaacctgtttctcaacccagggatcctggaggcagtaaccatgcagcacatcttcatgaacaatttccagctttgcagtgagatcaacgagagagttgttcagcacttcgttcactgcatagagactcacggtcggaatgtccagtatataaagttcttacagacaattgtcaaggcagaagggaaatttattaaaaaatgccaagacatggttatggccgagctggtcaattcgggagaggatgtcctcgtgttctacaacgacagagcctctttccagactctgatccagatgatgcggtcagaacgggatcggatggatgagaacagccctctcatgtaccacatccacttggtcgagctcctggctgtgtgcacggagggtaagaatgtctacacagagatcaagtgcaactccctgctcccgctggatgacatcgttcgcgtggtgacccacgaggactgcatccctgaggttaaaattgcatacattaacttcctgaatcactgctatgtggatacagaggtggaaatgaaggagatttataccagcaatcacatgtggaaattgtttgagaatttccttgtagacatctgcagggcctgtaacaacactagtgacaggaaacatgcagactcgattttggagaagtatgtcaccgaaatcgtcatgagtattgttactactttcttcagctctcccttctcagaccagagtacgactttgcagactcgccagcctgtctttgtgcaactgctgcaaggcgtgttcagggtttaccactgcaactggttaatgccaagccaaaaagcctccgtggagagctgtattcgggtgctgtctgatgtagccaagagccgggccattgccattcccgtggacctggacagccaagtcaacaacctctttctcaagtcccacagcattgtgcagaaaacagccatgaactggcggctctcagcccgcaatgccgcacgcagggactctgttctggcagcttccagagactaccggaatatcattgagagattgcaggacatcgtctccgcgctggaggaccgtctcaggcccctggtgcaggcagagttatctgtgctcgtggatgttctccacagacccgagctgcttttcccagagaacacagacgccagaaggaaatgtgaaagtggcggtttcatttgcaagttaataaagcatacaaaacagctgctagaagaaaatgaagagaagctctgcattaaggtcctacagaccctgagggaaatgatgaccaaagatagaggctatggagaaaagggtgaggcgctcaggcaagttctggtcaaccgttactatggaaacgtcagaccttcgggacgaagagagagccttaccagctttggcaatggcccactgtcagcaggaggacccggcaagcccgggggaggagggggaggttccggatccagctctatgagcaggggtgagatgagtctggccgaggttcagtgtcaccttgacaaggagggggcttccaatctagttatcgacctcatcatgaacgcatccagtgaccgagtgttccatgaaagcattctcctggccattgcccttctggaaggaggcaacaccaccatccagcactcctttttctgtcgcttgacagaagataagaagtcagagaaattctttaaggtgttttatgaccggatgaaggtggcccagcaagaaatcaaagcaacagtgacagtgaacaccagtgacttgggaaataaaaagaaagacgatgaggtagacagggatgccccatcacggaaaaaagctaaagagcccacaacacagataacagaagaggtccgggatcagctcctggaggcctccgctgccaccaggaaagccttcaccactttcaggagggaggctgatcccgacgaccactaccagcctggagagggcacccaggccactgccgacaaggccaaggacgacctggagatgagcgcggtcatcaccatcatgcagcccatcctccgcttccttcagctcctgtgtgaaaaccacaaccgagacctgcagaacttcctccgttgccaaaataacaagaccaactacaatttggtatgtgagaccctgcagtttctggactgtatttgtggaagcacaactggaggccttggtcttctgggcttgtatataaatgaaaagaacgtagcgcttatcaaccaaaccctggaaagtctgaccgaatactgtcaaggaccttgccatgagaaccagaactgcatagccacccatgaatccaatggcattgacatcatcacagccctgatcctcaatgatatcaatcctttgggaaagaagaggatggaccttgtgttagaactgaagaacaatgcctcgaagttgctcctggccatcatggaaagcaggcacgacagtgaaaacgcagagaggatactttataacatgaggcccaaggaactggtggaagtgatcaagaaagcctacatgcaaggtgaagtggaatttgaggatggagaaaacggtgaggatggggcggcgtcccccaggaacgtggggcacaacatctacatattagcccatcagttggctcggcataacaaagaacttcagagcatgctgaaacctggtggccaagtggacggagatgaagccctggagttttatgccaagcacacggcgcagatagagattgtcagattagaccgaacaatggaacagatagtctttcccgtgcccagcatatgtgaattcctaaccaaggagtcaaaactacgaatttactatactacagagagagacgaacaaggcagcaaaatcaatgatttctttctgcggtctgaagacctcttcaatgaaatgaattggcagaagaaactgagagcccagcccgtgttgtactggtgtgcccgcaacatgtctttctggagcagcatttcgtttaacctggccgtcctgatgaacctgctggtggcgtttttctacccgtttaagggagtccgaggaggaaccctggagccccactggtcgggactcctgtggacagccatgctcatctctctggccatcgtcattgccctccccaagccccatggcatccgggccttaattgcctccacaattctacgactgatattttcagtcgggttacaacccacgttgtttcttctgggcgctttcaatgtatgcaataaaatcatctttctaatgagctttgtgggcaactgtgggacattcacaagaggctaccgagccatggttctggatgttgagttcctctatcatttgttgtatctggtgatctgtgccatggggctctttgtccatgaattcttctacagtctgctgctttttgatttagtgtacagagaagagactttgcttaatgtcattaaaagtgtcactcgcaatggacggtccatcatcctgacagcagttctggctctgatcctcgtttacctgttctcaatagtgggctatcttttcttcaaggatgactttatcttggaagtagataggctgcccaatgaaacagctgttccagaaaccggcgagagtttggcaagcgagttcctgttctccgatgtgtgtagggtggagagtggggagaactgctcctctcctgcacccagagaagagctggtccctgcagaagagacggaacaggataaagagcacacatgtgagacgctgctgatgtgcattgtcaccgtgctgagtcacgggctgcggagcgggggtggagtaggagatgtactcaggaaaccgtccaaagaggaacccctgtttgctgctagagttatttatgacctcttgttcttcttcatggtcatcatcattgttcttaacctgatttttggggttatcattgacacttttgctgacctgaggagtgagaagcagaagaaggaagagatcttgaagaccacgtgctttatctgtggcttggaaagagacaagtttgacaacaagactgtcacctttgaagagcacatcaaggaagaacacaacatgtggcactatctgtgcttcatcgtcctggtgaaagtaaaggactccaccgaatatactgggcctgagagttacgtggcagaaatgatcaaggaaagaaaccttgactggttccccaggatgagagccatgtcattggtcagcagtgattctgaaggagaacagaatgagctgagaaacctgcaggagaagctggagtccaccatgaaacttgtcacgaacctttctggccagctgtcggaattaaaggatcagatgacagaacaaaggaagcagaaacaaagaattggtcttctaggacatcctcctcacatgaatgtcaacccacaacaaccagcataagcaaatgaaagaaaggaattgtatttaccttttataattattattagtgtgggtatggctaatgagttctgattcacccacgaaggttacatttatgctgaatacatttgtaaatactcagttttatactgtatgtatatgattgctactctaaaggtttggatatatgtattgtaattagaattgttggcatgatgacatttcatttgtgccaaaaatattaaaaatgccttttttggaaggactaacagaaagcacctgatttgcacttgaaccagattatagatttaaaagtatatgacatgtattttgtatttaaaactagaatagccagtatttatgttttttataaaactgtgcaatacgaattatgcaatcacaatacatttgtagctcccgagtgtcctaaagggagtgcacttctttgaagctggtgtgttaatactatgtaataaatggttaactttcaaatgatgctgctgccaaaattatattaatagtgagtttcaggcccctgggcattttgtaccatgtaattatcctctggtgatgctgtttctcgttagtggcagtagtgcctccgtctcctagtgataatgctccaagtctatgaactgttaaatcagcattcattttaagaaaagcaactttagtttcaaagatacttttaagcttctaaattgatcatttaaactatttctttaaataagagagccaaattagaggctcatactttagcttgtgaagaagataatgaattttttaaagggaactttctatgcaatgttcaggataaatcgatactgctggccaatcagtgtcatctcctgggtaaattttgatgtcgcattataaagacatgcataattgatggtttctagattatctagtccaaacaatagagtttattttttcttcatctgaaccaacatgctacagtagctaagaagtattaaaactatatacatccatataaagatgaaatatgaactatctcattagaagtcatagttgaccacagacatgttattcttctgaaagagccacattttggttttatttcttgtcacatgatttcttttcttgatggatgaaaaatatgaaatgaaatcttttatatctgttgcctagttttgtacatggatctcattttacaagagaatctctctgcta

SEQ ID NO: 93 - DNA, 124 bp, Homo sapiens
attttcgtggacgccgggtgagtgagagagttggttggtgttgggccggaggaaagcgggaagactcatcggagcgtgtggatttgagccgccgcattttttaaccctagatctcgaaatgcat

SEQ ID NO: 94 - DNA, 4359 bp, Homo sapiens
gtgagctgggctggcttccgtcctggtagccaaggctaattctccctcgagttcttgggagatgggcatttggcgagaaggctggcgttagtgaagcgcgcccggcgtcacggtgagtgcgggtcttgggccctagcacctgttctctgggaagtcgtccgctgtgaacgatgaacgcctttccttccaccagctgctggttaccccggagacaagctctgtccgcggagaggagtgggacaactcctaaaggaaagaagcacttgtaaggaaatatagcatccattgtgaaagtggaaaagtaaagataattcatcatgcctgctgtggcttcagttcctaaagaactctacctcagttcttcactaaaagaccttaataagaagacagaagttaaaccagagaaaataagcactaagagttatgtgcacagtgccctgaagatctttaagacagcagaagaatgcagattagatcgtgatgaggaaagggcctatgtactatatatgaaatacgtgactgtttataatcttatcaaaaaaagacctgatttcaagcaacagcaggattatttccattcaatacttggacctggaaacatcaaaaaagctgtcgaagaagctgaaagactctctgaaagccttaaattaagatatgaagaagctgaagtccggaaaaaacttgaggaaaaagacaggcaggaggaagcacagcggctacaacaaaaaaggcaggaaacaggaagagaggatggtggcacattggctaaaggctctttggagaatgttttggattccaaagacaaaacccaaaagagcaatggtgaaaagaatgaaaaatgtgagaccaaagagaaaggagcaatcacagcaaaggaactatacacaatgatgacggataaaaacatcagcttgattataatggatgctcgaagaatgcaggattatcaggattcctgtattttacattctctcagtgttcctgaagaagccatcagtccaggagtcactgctagttggattgaagcacacctgccagatgattctaaagacacatggaagaagagggggaatgtggagtatgtggtacttcttgactggtttagttctgccaaagatttacagattggaacaactctccggagtctgaaagatgcacttttcaagtgggaaagtaaaactgtcctgcgcaatgagcctttggttttagagggaggctatgaaaactggctcctttgttatccccagtatacaacaaatgctaaggtcactccacccccacgacgccagaatgaagaggtgtctatctcattggattttacttatccctcattggaagaatcaattccttctaaacctgctgcccagacgccacctgcatctatagaagtagatgaaaatatagaattgataagtggtcaaaatgagagaatgggaccactgaatatatcaactccagttgaaccagttgctgcttctaaatctgatgtttcacccataattcagccagtgcctagtataaagaatgttccacagattgatcgtactaaaaaaccagcagtcaaattgcctgaagagcatagaataaaatctgaaagtacaaaccatgagcaacaatctcctcagagtggaaaagttattcctgatcgttccaccaagccagtagttttttctccaactctcatgttaacagatgaagaaaaggctcgtattcatgcagaaactgctcttctaatggaaaaaaacaaacaagaaaaagaacttcgggaaaggcagcaagaggaacagaaagagaaactgaggaaggaagaacaagaacaaaaagccaaaaagaaacaagaagctgaagaaaatgaaattacagagaagcaacaaaaagcaaaagaagaaatggagaagaaagaaagtgaacaggccaagaaagaagataaagaaacctcagcaaagaggggcaaagaaataacaggagtaaaaagacaaagtaaaagtgaacatgaaacttctgatgccaagaaatctgtagaagatagggggaaaaggtgtccaaccccagaaatacagaaaaagtcaacaggagatgtgccccatacatctgtgacaggggattcaggttcaggcaagccatttaagattaaaggacaaccagaaagtggaattctaaggacaggaacttttagagaggatacagacgataccgaaagaaataaagctcaacgagaacctttgacaagagcacgaagtgaagaaatggggaggatcgtaccaggactgccttcaggctgggccaagtttcttgacccaatcactggaacctttcgttattatcattcacccaccaacactgttcatatgtacccaccggaaatggctccttcatctgcacctccttccacccctccaactcataaagccaagccacagattcctgctgagcgggatagggaaccttccaaactgaagcgctcctactcctccccagatataacccaggctattcaagaggaagagaagaggaagccaacagtaactccaacagttaatcgggaaaacaagccaacatgttatcctaaagctgagatctcaaggctttctgcttctcagattcggaacctcaatcctgtttttggaggttctggaccagctcttactggacttcgtaacttaggaaatacttgttatatgaactcaatattgcagtgcctatgtaacgctccacatttggctgattatttcaaccgaaactgttatcaggatgatattaacaggtcaaatttgttggggcataaaggtgaagtggcagaagaatttggtataatcatgaaagccctgtggacaggacagtatagatatatcagtccaaaggactttaaaatcaccattgggaagatcaatgaccagtttgcaggatacagtcagcaagattcacaagaattgcttctgttcctaatggatggtctccatgaagatctaaataaagctgataatcggaagagatataaagaagaaaataatgatcatctcgatgactttaaagctgcagaacatgcctggcagaaacacaagcagctcaatgagtctattattgttgcactttttcagggtcaattcaaatctacagtacagtgcctcacatgtcacaaaaagtctaggacatttgaggccttcatgtatttgtctctaccactagcatccacaagtaaatgtacattacaggattgccttagattattttccaaagaagaaaaactcacagataacaacagattttactgcagtcattgcagagctcgacgggattctctaaaaaagatagaaatctggaagttaccacctgtgcttttagtgcatctgaaacgtttttcctacgatggcaggtggaaacaaaaattacagacatctgtggacttcccgttagaaaatcttgacttgtcacagtatgttattggtccaaagaacaatttgaagaaatataatttgttttctgtttcaaatcactacggtgggctggatggaggccactacacagcctattgtaaaaatgcagcaagacaacggtggtttaagtttgatgatcatgaagtttctgatatctccgtttcttctgtgaaatcttcagcagcttatatcctcttttatacttcattgggaccacgagtaactgatgtagccacataaggagacataggttataaactagttatcttttaaaaggctcagcaacacaactcttgaaatgcttatcaggataatggtagctatagctggccatttagaggaattctaggacagtgggagctgtgttactagcactatataattccggtcagtgctgacaaataacatttaacaagtattgcagtaatcatcacttacaggtaccatttatttcaaaacaacttttttagtctgctccaaagttaaaataattaactagctaagcattattattcaactggtctaaaaactattgttatctttttttttccttttcactgttatggccttttcacatttctaaatcccatcttgatatactatgaatactctagaatgatgtaaagcagataggaatgtatgtgtacatatttattgcatacttgcacatcaaatcgatgtacatagtttaacacgtggtccttttgtgaaacctagaactcagaggattgctttttttctttcagcctattttgagttaacttcagtcctttcttagggaaatgacagggcaaagcaatttttctgttggctttgggctgtatttgtgcactaaatctttattctaaaaaaaaaaatggaaactttaatttttttaaaacgggaatttcatttacagctacattaaaatcttaatgagaaaaat

SEQ ID NO: 95 - DNA, 4165 bp, Homo sapiens
gtctaaagagtgtaaagacctaattacacggatgctacagagagatcccaagagaagggcttctttagaagagattgaaaatcatccttggcttcagggagtggacccttcaccagctacaaagtataacattccccttgtgtcatacaaaaatctctcggaagaggagcacaacagcatcattcagcgcatggtgcttggggacatagcggatcgagacgccattgtagaagccctggaaaccaacaggtataaccatatcacagccacatacttcctgctggctgaaaggatcctgagagaaaagcaagagaaagaaatacagaccagatctgcaagcccgagcaatatcaaggcccagtttaggcagtcatggccaaccaaaattgatgtaccccaggaccttgaggatgacctcacggccactcctttgtcccacgcgactgtccctcagtctcctgctcgggctgctgacagtgtcctcaatggccacaggagcaaaggcctgtgtgactcagctaagaaagatgacctccctgagttggctggaccagcactctctacggtgccacccgcaagcttaaaacccacagccagtgggcggaagtgtctgttcagggtggaagaagatgaagaggaagatgaggaggacaagaaacccatgtccctctcaacacaagtggttttgcgccggaagccatctgtaaccaaccgcctgacatccaggaagagtgcgcccgtcctcaaccagatctttgaggaaggggaatctgatgatgagtttgacatggatgagaatctgcctcccaagttgagcaggttaaagatgaatatagcttctccaggtacagttcacaaacgctaccaccggaggaaaagtcagggccggggctccagctgcagtagttcggagaccagtgatgatgattctgaaagccggcggcggctcgataaagatagcgggttcacctactcctggcaccgacgggatagcagcgaggggccccctggcagtgagggggatggcgggggccagagcaagccgagcaatgccagtggaggggtggacaaggccagccccagtgagaacaatgctggtgggggcagtccctccagcggctcgggtggcaaccccaccaatacatcgggtaccacacgccgctgtgccggccccagcaactccatgcagctggcctctcgcagtgctggggagctcgttgagagcctcaaactcatgagcctctgcctcggctcccagcttcatgggagcaccaagtacattattgatccacagaatggcttgtcattttccagtgtgaaagtccaagagaaatctacgtggaaaatgtgcattagctccacagggaatgcagggcaggtccctgcagtgggcggcataaagtttttctctgaccacatggcagataccaccactgaattggaacggataaagagcaagaacctgaaaaataacgtgctgcagctacctctgtgcgaaaagaccatctctgtgaacatccagcggaaccctaaggaggggctgctgtgcgcatccagcccagccagctgttgccatgtcatctgactgtggccccatctggccgctagcacgcttcctgctcagagcagtgaagaccggctcacttcactgttccatttggttttactattttaaagtgggcgttaggagcaattatttattacctttccatttgttcgcctgatgatgtgacaatgcatggtctttgtgcatgctgctagacacttttctttcccagccgaaaagcctattatgtaatttttacattcataattttaatgtggatgatcaggattaaatcaagatatatatctggaacctcttataaatggagcacttagaaatttgttgttctgcacttaacctagagagagaaaaaatgcttttctttgtgaaaaatctgaattcctgtcctgaccttctgtgatgtggaaaccctaggctctgagacacactctctggtgtctgagacagaaccaaagcaataacgttgtgatgcccacaggcctggagccagctagcgaccttgtgccgcccagctgtccatggcccgtgcagagcagaggacagtgagtgtctgcactgagaaccttaaaccacagttgaacatacccacacctgtttgtcttaagctatagtgtaaaaacaaagtttgggctctgaaaatttaactgaaaaagatttccttgtttttgtaataggtgagataaagtacttagatttataaggcagcttcccctgtagtgataaattacaagcagacaatcttattttgtaatgtgatgaagtgatgatgtcttaactctacttagagagtgtatgtctgtctaacagaacaaaaagatgctctgtgtaaattccttcctgtagggcacactgcaggatttccatgtagatagaagaactatagggcctagtacagaaggtgcacacaaatgttggcaaagtcaaaccccatgaattaaaacctactggaatttggtttttaggagtttggtaattagattatctcttttgttattttcattcagttatatcctttggctcagctagctttgaaattggctgatgaaaaaatatacataaaagggtaaaattcacacatacagcaaacaaaaatgcacaaagcctgcttcgtaacttttttttctggaattgtttttcactttgcctttttctgccaaaacaataatcaaagaactcttgctttaacctattcctgtacaaagactgtttttgaccagataatcatctgttgtggcattctatcttgtaggacactgtatattgcaaattgctgattatggaaggggccagttgctgttttttcatgcagtgccctgggagtcttaaaagcagtgcttagcaacattggtgatagcatgtggctgggacccagggcccttccccactcttcagccccgagtcatgtgtctgaggtgacggactgagacgcatctggtcctgtaattcagagagtgggcacatcaccaaagaactgcattgctgtggtcactgtttcttcaagtacacactgactctgctactttaggataaatatattttactcagaactctgaatttcacagtatacttactaaactaagtaaaaatgatacttaaaatacttattttactttctagacctaggctagatgttttaagctacagctctagttcattgtgatatttataatttgaaagctatgagaatagatgtgtgggtgaagccatagaacatatttgcttgaaattcttgagcagggatcttataaagggccagaaataagatgtgtggttcacatagatagtgagcgtaacatctgtattaaacataggagagaagtttataaagggcattggcaataaactctttgttgcagctgttttccaagcagtgtaaatactttttcctgtgattatgtatagccttggaatggcaccttttaactaacccatatgtgtttggtttcaatggttttttatattcagatgtatatatggtgctcactttaggatcagcagtgttgaccatttatgctgcatagctgtattatagccttattagttgtgtggttgacccttggggtatacaaatgtcagtctgagtggtgtcttactcctttgtttataagtgaatgattgtgcatgttttgtatgtcatagtatgtcgtcacataaaagggagggagcgaaaaaccattacattaagataatattggaccaaactacttacttgctctaaacagttacttgtaccccttaacctgtcttcaaaagttgcatatagttacagtagtgtataaattaaatattgtggaaaaacagtcttgtatttttctgtatgtgtgtatatatatataattatgtacttctggcaattctatctgtatttaaagatgtgacaatcttgacaccaattttaagaatagctgtgagaccgaattaaagataatccctaccaagtgaaaattgatgtgtgttaagagggtacagaattatcaactgatttggtcagttgcttccaatgctggttgatttccctcattgtgtaaacattgacaggtatgtgacaaatgggaaaaaaaatccaaataataaagtgacatattggtgttcagcaat

SEQ ID NO: 96 - DNA, 966 bp, Homo sapiens
ggcagtggaaccttcgggctcctgagcttcaggatggttcgtactaagacatggaccctgaagaagcactttgttggctatcctactaatagtgactttgagttgaagacagctgagctcccacccttaaaaaatggagaggtcctgcttgaagctttgttcctcaccgtggatccctacatgagagtggcagccaaaagattgaaggaaggtgatacaatgatggggcagcaagtggccaaagttgtggaaagtaaaaatgtagccctaccaaaaggaactattgtactggcttctccaggctggacaacgcactccatttctgatgggaaagatctggaaaagctgctgacagagtggccagacacaataccactgtctttggctctggggacagttggcatgccaggcctgactgcctactttggcctacttgaaatctgtggtgtgaagggtggagaaacagtgatggttaatgcagcagctggagctgtgggctcagtcgtggggcagattgcaaagctcaagggctgcaaagttgttggagcagtagggtctgatgaaaaggttgcctaccttcaaaagcttggatttgatgtcgtctttaactacaagacggtagagtctttggaagaaaccttgaagaaagcgtctcctgatggttatgattgttattttgataatgtaggtggagagttttcaaacactgttatcggccagatgaagaaatttggaaggattgccatatgtggagccatctctacatataacagaaccggcccacttcccccaggcccacccccagagattgttatctatcaggagcttcgcatggaagcttttgtcgtctaccgctggcaaggagatgcccgccaaaaagctctgaaggacttgctgaaatgggtcttagagggtaaaatccagtacaaggaatatatcattgaaggatttgaaaacatgccccgg

SEQ ID NO: 97 - DNA, 1102 bp, Homo sapiens
gcctggacagtcagcaaggaattgtctcccagtgcattttgccctcctggctgccaactctggctgctaaagcggctgccacctgctgcagtctacacagcttcgggaagaggaaaggaacctcagaccttccagatcgcttcctctcgcaacaaactatttgtcgcaggaataaagatggctgctgaaccagtagaagacaattgcatcaactttgtggcaatgaaatttattgacaatacgctttactttatagctgaagatgatgaaaacctggaatcagattactttggcaagcttgaatctaaattatcagtcataagaaatttgaatgaccaagttctcttcattgaccaaggaaatcggcctctatttgaagatatgactgattctgactgtagagataatgcaccccggaccatatttattataagtatgtataaagatagccagcctagaggtatggctgtaactatctctgtgaagtgtgagaaaatttcaactctctcctgtgagaacaaaattatttcctttaaggaaatgaatcctcctgataacatcaaggatacaaaaagtgacatcatattctttcagagaagtgtcccaggacatgataataagatgcaatttgaatcttcatcatacgaaggatactttctagcttgtgaaaaagagagagacctttttaaactcattttgaaaaaagaggatgaattgggggatagatctataatgttcactgttcaaaacgaagactagctattaaaatttcatgccgggcgcagtggctcacgcctgtaatcccagccctttgggaggctgaggcgggcagatcaccagaggtcaggtgttcaagaccagcctgaccaacatggtgaaacctcatctctactaaaaatactaaaaattagctgagtgtagtgacgcatgccctcaatcccagctactcaagaggctgaggcaggagaatcacttgcactccggaggtagaggttgtggtgagccgagattgcaccattgcgctctagcctgggcaacaacagcaaaactccatctcaaaaaataaaataaataaataaacaaataaaaaattcataatgtg

SEQ ID NO: 98 - DNA, 5544 bp, Homo sapiens
ctcctgcacggcgagtgctggagcacgagctaccgctcgctcggtcagggcgccccctccgcccgcctcctgcttcctcctccgctgcctgccgccgccgcctccaccattgtataatgctcggggcgcgcaggcagagaacggcggagtcttagcttcagcctcgcctgctgcccgctccccggcgccaccctcgggcccctggagcggggcactccgcatggagcgggagtagctgaggagtgggcggaaacccctcctgatgcgttagttcccaggtggagctgcatgtgatatatgttgggtaaaggaggaaaacggaagtttgatgagcatgaagatgggctggaaggcaaaatcgtgtctccctgtgacggtccatccaaggtgtcttacaccttacagcgccagactatcttcaacatttcccttatgaaactctataaccacaggcccctgacagagcccagcttgcaaaagaccgttttaattaacaacatgttgaggcggatccaggaggaactcaaacaggaaggcagcctgaggcccatgttcaccccctcctcccagcccaccaccgagcccagcgacagctaccgagaggccccgccggccttcagccacctggcgtccccgtcctcccacccctgcgacctcggaagcactacgcccctggaggcctgcctcaccccggcctcactgctcgaggacgacgatgacacgttttgcacctcccaggccatgcagcccacggctcccaccaaactgtcacctccagccctcttgccagaaaaggacagtttctcctctgccttggacgagatcgaggagctctgtcccacatctacctccacagaggcggccacggctgcgactgacagtgtgaaagggacctccagcgaggctggcacccagaaactcgacggtcctcaagagagccgcgcagatgactcaaaactgatggactctctgcctgggaattttgaaataacgacgtccacgggtttcctgacagacttgaccctggatgacatcctgtttgctgacattgatacgtccatgtatgattttgacccctgcacttcctcatcagggacagcctcaaaaatggcccctgtgtctgccgacgacctcctcaaaactctggctccttacagcagtcagcctgtcaccccaagtcagcctttcaaaatggacctcacagagctggaccacatcatggaggtgcttgttgggtcctaagacccagggacccagcgactatgcccacccagaccccagagcgttcccataaccctgacagttctccacactgtgcatgcacccttgcttgcctttttcagagaaaaagaaaattttacaacaggatcacactagtttttgctttgagcagagttggagtgccttcatccaagtatgaccacttttaatacacttttttgagtggttcctcagagacctactaccctggtataggaaagaatccatttgaagacaatgttgcaatgttgaatgacaaaaataaacagttcaagtgaagcacaaggattaagttggaaaagctgtaaattgcatgtgcatatttgtctattttttctataagttttattgcaagaggtaaagaagaaaactatatatatatatcttatttagataatctcagtaccttttctggcatttttgccctgtataggttgacttggcaattcggcctttttagaggcattaactactcctcgtaagtgttgcatttacatggctgtttagaaaactgctgcccaaatttattttatatttttgtacagattctgcagtttatgatattgtttttctaaaaacaaatgctgtttatacatatgagatagctattttgataggatttgctcacatagttcctgcaaacttcagatgtacaagttgcacttgtacttttatagagttgtaatgttttatatgtgtatggtgcaagagaaaattggatcaaatcaatctgcagttgatgtccccaaatgcaaacacaggcacacacatgcacacacccataaacacacacacagtgctttaagaaagggccaggtgatatcacacccaaatttcacaagcactgaccccctggcaccaacacccgccagtactgtgacttccaaagccagagccacatgtgctcatcaaacttgcattaagcagttggcgggagatggctgtggagctgggggtttaagtgatggttctcttttgctccctcttttgagggtaaagctactgtctttcttaagagtgtatttatgccaagtttgcgcttttaattgtttttattttgttttttaatgaaaacccagatctttcctttttggcataatttttatgatgacctgaaattttacatccgaacaaaattttacatccgaaaagcaaccaacttcttcatggaactcagccctgttgcaatgcttagggcccttaaagaagaaaatctccccagaaggcatccatcatgttgcttaattgtcttctgcagcttcctttccctagagctttccctgtgttgctaagagctgaaaatggcatcttcgtgatcaccacagtgagcttggctcgcctcggccggcccgggatgcactcttacaacatgtgtgactcttgaacctggagttcatcacattacgtcacagcttcccatctggttgctttcctgagtcagctacttcacacttgtcaaggctgttttaccccaaaactcagacaggactttctatgcatgttttccctcctccccccaattccccccccatcaccttatctcccaggacacacttgagaagtagctttttattcctagtggtgtacatttaattttaaaaaggttgcaatgtatcatgcttgttgccgaaactgtttatggccttcttgtttcagttttttcttttcttccaatggtactttagctgttgagtgcaggttacaacctatattgttatgcagatggcttctttaggaataacttttatatttatttaaaaatttttaaattatgggatgttttgttgttgttgttgtctttgttgttggtcatttgtcaatattcagtcaccaattctgctcacttcttgccatggataaaattgggtctttctggctaattaaaaaagacaactttataaaatggcactttaagcaagccatagttagttttatttttgtaatgcacatggcaaagcaaagacgtttgtgatgaaggaactgctcatctaagcaaaagatttgagtatgatatgataaaggctttctacattctaatttactttttccccccacttgaatgtgttttaaaggctaattatcagctcagtagagcagtgagaaactgatcaaattgcacttgttctcctacaagcaacctccacgcagacacctcgtactgctacaggtgtgtcatttcctttaataggaccagggaccatgtaactgaggtgagggttgtagtagatgcttccagtgtcagtatgcctgttaattttaagagcttccctttcttgcagagaacaagtctgcccagattccatgctttctataactggaggacctggcaaacctgccgcatgctgcacacatctacctacgtacacatatacaatagtattgatgattctgaacaataacagggtaaaacagttggtttgccattgttaaaaactgatttacagtaacttacaacaactgtacttttgttggattagcaaatcatgtgtttaaacaaatcccatatgttgggcaacagttcaaataagcacggagaagtgttgcccaaacttggttctctgactcttatgtatttgtaaggctgggcttcaaaatcaaaacaaaaaccccaaaaacagcaggcaaatgctttttaactctgacaccgttgccataaatccctgatactcaaagtctaacaagaaagacatggaaaattagcagcccattttcagaaagatcaaaatgatctagggttctaattgcttttgcatcctattcttacaaagtgatgtcccaacagggaacagtaggagctggagtgggatctccaagtcccagtttgagtgtgggatgtgcttccagcagtgccttccctttatgaaagacatcacatggcatccagggccaggcaggcagcttgaggtgcctttacgagaaaaccgagctggggctgggagaggacagttattgacactgatgtgcaatgaagtgacaagatgagagcagaatcgtaagagctttgaatttgaagtgagtttttttccccccataagttatttattccttttttctgtgtaaatatatttattttactgtggagcgctaacatctggatcgtaacatgtgcagaatgtatggtaggaatgtattctcttgtaggaatgtaaatctgtattaaaagggggtccaagccaggcccccaggtcttctcattgtatgcacagtccgcattcatttttactcttctctaatatgggtctatttgaaatatgcaaaaggtatgaggaatgttttaatacctccaaatttttaagaaaagcatcaaagggttgatattttttaaagtttttttagtagcactttctctggatgacagaaggggcaaccacatgggcacccttgttcataccaaagggtgagcagtggccagagcctcctctgcacctctcgagtgtctttaccaattgagctttttatcgccatagccccttggagtgccccagctgccctgaggtcaatcaaggaaaatttcttaatgaaataagctccaaagagccaaagtatcaacttacagatcgtttttaaagcttaaatttatgaaccacctttgtggtaaacaatgaattatgaataccgcagggcagccttcttaaatgacaaatgtaaaaaaaaaaaaaaaagactctacttcgtgcagcaattgctactctatacgaattgtcttaatttgaaaaccttgctgttacaaattggacctttatacattttctgaaaacaatgaaaagagtatatttaaccttttctggctgtaaatggttaccttcctgtaactgccccgcacctggaggcatggagttgtgtgcatcctgcttatgtacaattgttttcagtgtttctaagaatgagtctgaatggttcttgaaaattagccaggatcaaatgctattgcagacaaagccaataaaaagttggacttcttttggggataacaagttttggaagagaaatgcaggccatatgtgcgcatgaccgagattttgaaaaaagatgtacatagtgacatgtttggtgcatggtttttgaggagggcttttgtcaaaaaggaggtataacctttcccccacagacctgagagctgtgccttttctatgcaatattacagacgttacatcggaacccagatggctgtattcacatgtaggtttgggctgtaatctaaacaattggacagattaaatgtacatggaaatgagcagtcttacttttgtagttttatattatacaataaacagttaaaagatg

SEQ ID NO: 99 - DNA, 457 bp, Homo sapiens
  misc_feature (1)...(457): n=a,t,g or c
gactttaaatgataaacttttattctgaatatactgtttttgcacaagatttaacacaacattttctgggattataaatatttbataacagtattatacaavtbbbyacaaaatgtttttatcaggctaggtaattttcacaaaagtgtcaagrgaacaaaataaaggggagaaaagatctattgttcacaaaagtcgagttttttttttttttttttttttttttattcaaattttattggaagtttacaaatgtattacagacatcagtaaaacatcatatccattttacagggcacggntctcaagcaaagtgttcagaacagtctctggcagrscccacaccaaaggcctgttgcagaccttcttaacaaatagcttgacactcaacacagaacacaggctytggcctgcctcaccttcccaggccctttggggttttgtttatgcacttgaa

SEQ ID NO: 100 - DNA, 1728 bp, Homo sapiens
ggtgcgcaagggcacggacctcggagctctccccgttcccccgccggccatgaacgccgctcgcaccggctaccgagtcttcctcgccaactccacggccgcctgcacggagctggccaagcgcatcacagagcgccttggtgctgaattggggaagtctgttgtatatcaagagaccaatggagaaacaagagttgaaataaaagaatttgttcgtggccaagatattttcattatacagacaatacccagagatgtgaatacagctgtgatggagttgctcatcatggcttacgcactgaagactgcctgtgccaggaacattattggggtcatcccctacttcccctacagcaagcagagcaagatgaggaagaggggttccattgtgtgcaagctgctagcatccatgctggcgaaagcaggtttaactcacattatcactatggatcttcatcaaaaggaaatacaaggctttttcagctttcctgtggacaaccttagagcctcacctttcctgcttcagtatatccaggaagaaattccaaattacagaaatgcagtcattgtagctaagtctcctgatgctgcaaagagggcccagtcctatgcggagagactgcgtctgggtttggccgtcattcacggggaagctcagtgcacggaactggacatggacgatggtcgtcactccccgcctatggtcaaaaatgctactgtgcacccaggcctggagttgccattgatgatggccaaagagaagccaccgataactgtagttggagatgttggaggccgcatcgcaatcatcgtggatgacattattgacgatgtggagagttttgttgctgccgcggagatcctgaaagagagaggcgcctataagatctatgttatggccacccacggcatcctgtctgcagaggcccctcgcctgattgaggagtcctccgtagacgaggtggtggtgacgaatactgtccctcatgaggttcagaagctgcaatgtcccaagataaagactgtggatatcagtttgattctttctgaagccattcggagaatccacaatggagagtccatggcctaccttttccgaaacatcactgtggatgactagctttcacgagggtctcgaccctggacctcctgagggaaacatggaaaaagcagtgccatgagtgatacagtgtttccttgcaagggaggactcgaaacagcctggagttagatatcttcttttgcccggattgatggggaggagggattaaaagagtcaggaagaagacagagctaatggataaatatcataacatggccttacatgtctgctgtcatcagccctgttccttaaaagttctagctgctttcttaaaaataatctgaaaatcttattgatactaaagaggagttaaaggcacataaagtcttaactctataatgttcatttagttgtttcagctccagggaaatggaggtattgatgttgaacctggttagggaagctgagcgcctgtggccctattactatccagttggcctctcccaaatcaacttcaagtcttttatagagaatcgtatttttctttcagaaattgctatgcctacagccattgaaaaatgaagcattcatgttgttacatcttccaaggatgtcagattagaaaatagcatcccacctctgggtatctgagtggctctgaagttgcaaataaaataatttgttgt

SEQ ID NO: 101 - DNA, 4101 bp, Homo sapiens
ggctcctcgcgatcttgttcctttcccctccgcttctctgacctagctgcgcggccccggcccgggagctgccgaacccgcgcctcccctgggtgaggaggacacgcctgccctcgtcgagaaaacttttcctgccgactcagttggggcggcggtggcaggaagtgcgggcagcgacctctcctccgcctgccccgcgcgccctgccggaggtcggcgctgagcttgcgatcaagtttgtgggggccccccttcccagttgccggcgagtctcgcctcgagaggggcgcccgaccccggggagggcggcaggccagggcgaaggccaagggcgttttgtggcgccggagactaggtgcggagcaaggcggggactcgcacccgcatccgagagcgcggaggtcgcgcagcccgggagaagggagcctccggcggctgcttcctagagtccacagtgcgctgtctcctttggctgaggagagtgtcctggccccgagtctatcgaggaaaatgaagttaagccgccagttcaccgtgttcggcagtgcgatcttctgtgtggtgattttctcgctctacctgatgctggaccggggtcacttagactaccccaggaacccgcgccgcgagggctccttccctcagggccagctctcaatgttgcaagaaaaaatagaccatttggagcgtttgctagctgagaataatgagatcatctcaaatattagagactcagtcatcaatttgagtgagtctgtggaggatggtccgaaaagttcacaaagcaatttcagccaaggtgctggctcacatcttctgccctcacaattatccctctcagttgacactgcagactgtctgtttgcttcacaaagtggaagtcacaattcagatgtgcagatgttggatgtttacagtctaatttcttttgacaatccagatggtggagtttggaagcaaggatttgacattacttatgaatctaatgaatgggacactgaaccccttcaagtctttgtggtgcctcattcccataacgacccaggttggttgaagactttcaatgactactttagagacaagactcagtatatttttaataacatggtcctaaagctgaaagaagactcacggaggaagtttatttggtctgagatctcttacctttcaaagtggtgggatattatagatattcagaagaaggatgctgttaaaagtttaatagaaaatggtcagcttgaaattgtgacaggtggctgggttatgcctgatgaagctactccacattattttgccttaattgatcaactaattgaaggacatcagtggctggaaaataatataggagtgaaacctcggtccggctgggctattgatccctttggacactcaccaacaatggcttatcttctaaaccgtgctggactttctcacatgcttatccagagagttcattatgcagttaaaaaacactttgcactgcataaaacattggagtttttttggagacagaattgggatctgggatctgtcacagatattttatgccacatgatgcccttctacagctatgacatccctcacacttgtggacctgatcctaaaatatgctgccagtttgattttaaacgtcttcctggaggcagatttggttgtccctggggagtccccccagaaacaatacatcctggaaatgtccaaagcagggctcggatgctactagatcagtaccgaaagaagtcaaagctttttcgtaccaaagttctcctggctccactaggagatgatttccgctactgtgaatacacggaatgggatttacagtttaagaattatcagcagctttttgattatatgaattctcagtccaagtttaaagttaagatacagtttggaactttatcagatttttttgatgcgctggataaagcagatgaaactcagagagacaagggccagtcgatgttccctgttttaagtggagattttttcacttatgccgatcgagatgatcattactggagtggctattttacatccagacccttttacaaacgaatggacagaatcatggaatctcatttaagggctgctgaaattctttactatttcgccctgagacaagctcacaaatacaagataaataaatttctctcatcatcactttacacggcactgacagaagccagaaggaatttgggactgtttcaacatcatgatgctatcacaggaactgcaaaagactgggtggttgtggattatggtaccagactttttcattcgttaatggttttggagaagataattggaaattctgcatttcttcttattttgaaggacaaactcacatacgactcttactctcctgataccttcctggagatggatttgaaacaaaaatcacaagattctctgccacaaaaaaatataataaggctgagtgcggagccaaggtaccttgtggtctataatcctttagaacaagaccgaatctcgttggtctcagtctatgtgagttccccgacagtgcaagtgttctctgcttcaggaaaacctgtggaagttcaagtcagcgcagtttgggatacagcaaatactatttcagaaacagcctatgagatctcttttcgagcacatataccgccattgggactgaaagtgtataagattttggaatcagcaagttcaaattcacatttagctgattatgtcttgtataagaataaagtagaagatagcggaattttcaccataaagaatatgataaatactgaagaaggtataacactagagaactcctttgttttacttcggtttgatcaaactggacttatgaagcaaatgatgactaaagaagatggtaaacaccatgaagtaaatgtgcaattttcatggtatggaaccacaattaaaagagacaaaagtggtgcctacctcttcttacctgatggtaatgccaagccttatgtttacacaacaccgccctttgtcagagtgacacatggaaggatttattcggaagtgacttgcttttttgaccatgttactcatagagtccgactataccacatacagggaatagaaggacagtctgtggaagtttccaatattgtggacatccgaaaagtatataaccgtgagattgcaatgaaaatttcttctgatataaaaagccaaaatagattttatactgacctaaatgggtaccagattcaacctagaatgacactgagcaaattgcctcttcaagcaaatgtctatcccatgaccacaatggcctatatccaggatgccaaacatcgtttgacactgctctctgctcagtctttaggggtttcgagtttgaatagtggtcagattgaagttatcatggatcgaagactcatgcaagatgataatcgtggccttgagcaaggtatccaggataacaagattacagctaatctatttcgaatactactagaaaaaagaagtgctgttaatacggaagaagaaaagaagtcggtcagttatccttctctccttagccacataacttcttctctcatgaatcatccagtcattccaatggcaaataagttctcacctacccttgagctgcaaggtgaattctctccattacagtcatctttgccttgtgacattcatctggttaatttgagaacaatacagtcaaaggtgggcaatgggcactccaatgaggcagccttgatcctccacagaaaagggtttgattgtcggttctctagcaaaggcacagggctgttttgttctactactcagggaaagatattggtacagaaacttttaaacaagtttattgtcgaaagtctcacaccttcatcactatccttgatgcattcacctcccggcactcagaatataagtgagatcaacttgagtccaatggaaatcagcacattccgaatccagttgaggtgaacctgactttcacatttggattgagaatcattggcttttatacctttcttggtttgacgtgcaataaagaagcacattattttagcttctggctactgtgagaacatgaattctgtgattctgtgggttttttcttttttcttttaccagtacagtaag

SEQ ID NO: 102 - DNA, 5046 bp, Homo sapiens
ccgttgctgtcgccgttgctgtcgggggcgctgtgcgctgaggaaggcgcgggcgagccggagcagaagaaggagggagggagccagccgctgcagccaccaccgccaccatgtcctaccaaggcaagaagaacatcccgcggatcacgagtgaccgtctccttatcaagggaggcagaatcgtcaatgatgatcagtccttttatgctgatatttacatggaagatggcttaataaaacaaattggagacaatctgattgttcctggaggagtgaagaccattgaagccaatgggaagatggtgatccctggaggcatcgatgtccatactcacttccagatgccatataagggaatgaccacagtagatgacttcttccaagggacaaaggcggccttagcaggtggcaccaccatgatcattgaccatgtggtgcctgagcctgagtccagcctgactgaggcctatgagaaatggagagagtgggctgatgggaagagttgctgtgactatgccctgcatgtggacatcacccactggaatgacagcgtcaagcaggaagtgcagaacctcatcaaggacaaaggggttaactccttcatggtttatatggcttataaggatttgtatcaagtatctaacacagagctctatgagatcttcacctgcctgggagagctgggggccattgctcaagttcatgctgagaatggggatatcattgcccaggagcaaacccgcatgttggaaatggggataactggcccagaaggccatgtactgagcaggccagaagagctggaagctgaggctgtgttccgtgccatcaccattgccagccaaaccaattgccctctctacgtcacaaaggtcatgagcaagagtgcagctgacctcatctcacaagccaggaaaaaaggaaatgtagtctttggtgagcccatcactgccagcctcggcatagatggaacccattattggagcaagaactgggccaaggcggctgcatttgtgacatccccacccctgagccctgacccaactactccggactacatcaactccttgctggccagcggggatctgcagctatctgggagtgcccactgcaccttcagcactgcccagaaagcaattgggaaggacaacttcacagccattcctgagggcaccaatggtgtggaggagcggatgtctgtcatctgggacaaggctgtggccacagggaaaatggacgaaaaccagttcgtggctgtgacaagcacaaacgctgccaagatcttcaacctgtatccccgcaagggaagaatatctgtgggttctgacagcgacctcgtcatctgggatccagatgctgtgaagatcgtctctgccaagaaccaccagtctgcggcagagtacaacatctttgaagggatggagctgcgcggggctcctctggttgtcatctgccagggcaagatcatgctggaagatggcaacctgcacgtgacccagggggctggccgcttcataccctgcagcccgttctccgactatgtctacaagcgcattaaagcacggaggaagatggcagacctgcatgccgtcccaaggggcatgtacgatgggcctgtgtttgacctgaccaccacccccaaaggtggcacccccgcaggctctgctcggggctctcctactcggccgaacccacctgtgaggaatcttcatcagtcgggatttagcctgtcaggcacccaagtggatgagggggttcgctcagccagcaagcgcatcgtggcccccccaggcggccgttctaatatcacatctctgagttaagcaagccttcctcaaagagaggggcagaagcaagaagagattgttttgaagccaaaatggtacaccgatatttaagaaggaaagcgaatccaaacggttgtgatctaaagaatcaataagcctcaagccttatgtttctccaatgttacgctcgcttgcctagctttacgaatattgctttgttttctgtttatgcatagccttgatttgtttgactcccctccccccatttacatgcatgcaatcagacaggccactaaggtaaaagagtctgctctatcatagtgttgagagcgtgtgtagtgctgcatcttatgacaaggggacagacaagctgggacgtcagggaaatgaacaaaagggacgcaggttatttggggtgagtgggtggtgggagcctggagcaaggtggagggtgcagaggggctggggtagggcatgtaggagggaggtgggtgggtcaggtgagtggaaggggtgttgtatattgtgttgatgacgtacgttatttccatggaagatagccgctgtggcagctgtcacatcaccacagctccctagggtctgccgagaaggcaggcagtctttgggttctgttctttgtcacgtcccctacaagtaaattttgtttctttgaacgtttattaaaatgccaagacccaaccatttcttccacctgcttgattgtgccagtgtttgctcaggcctctttcttagtgttgctttcaaatccttctctttcctgggttgggaaggccaggcagggacagagcaaatgacacttctcttcctcttgccctccctgcctctttggtgctcttaaaagccagcagctgagaacatagcacaggcccacgtggtgagggcacccacagcttaaagacgcttccttctaaacacggcgaggtcacctctcactcttctgtctttgcaaaccgagaagagtggcatgcttctggcatcccaagtcaggattttagctcagatgaggcagaatgaagggcctctcttacaggcagtttgtgtttgattctctcgatcctggcacatccatgataaataggagtttttgaaagttggttttattaggtgttccctaatttttaccgtaataggtcatctcagcttatatgaaagtcaagtggggaactgggaaagccaaagtcagtcttgagcagagggagcacattttgtggacctggttccacctttccattccaaaccacctgtttccccttccattagcagaaactctgggggaactttgtgtctcagtcctagaatctccccaagtgagtggaagtgacatgatgcagtcttcctcatggggcacctgaaagaaattagtgtgggtgcttcgatctaccttgtctgtcagagttgaatatctctttccctatcatgctgcttctgaaaattcagttttggagcaagtcctgtgagcaagataagaatctatagaaccaagatgctcattttcagaagaaatatgttcaacctgggatcagacttccatgctctggggaatccaagtggtagcacctgtaaccctgtgtactaagtgctttgaagagaagagcaggcctcagacaccttttaattgcttaggagaaaccattgtctctgactgcaggtttgaataagttgaagaccagagaaaagtacacactgggctacaaaggaatttggagatagccaaggaacaggatttcccctagcaagctaccttctgttcaaatcatgaaaaaagactatttccccttagaatagggaagcttgctattttaaagctcttgtagtgcttttcttttaagggagatgtagtaaaagggaaaatgtagctcttagtttacacttcaaagatgtgggggtctttcagagaactaagaataacagttttatgtgcagagagagtttgccagatctgaagcatatacctcattgactaggctgttactttgggataggttgcagtaccagccacagccagcagatagaggaaaagacacacataaactcgcttctgagcgtccacttctgcactctctgctctgctgttactcagcccctgagtctgactcatctctgcacaacctctctgtgccatgaagataagtcttccatggccaaatcggtcatccgcactgcccttgggacttccgaagtgaaccattccaccagaacctttgattctgcacaagatttccttgctctgggaacaacccccaaatgcccttgggaggaacaacatgagctcaggaagcctctctttcttcacttaccattactaactctccaagcatagaaatccctgggaattgcgagaataactcccactattttaaaatttatattcagatttgtttcgtttcataagacacatcaaacaggcctatacaaaaggtttaggaaaagaaaacaatggtgagtcccggccctcttcgaattcactggcacctcatgcaagtgtaggaaggcacgctggatcgtctatctgattccaaagctgtcctttgccatctcatcccttggcctgccccccaaccctgaggatgcccctgccatccccccaacctcctcatattgcctctgaacccagatggcaatccatcccggttctctctgagggccacgggcttgggtagtggaaagggtgtttgggaaattgttaaatcagttacccgtagtagagctatttcttgtacttctaagttttctagaagtggaaggattgtagtcatcctgaaaatgggtttacttcaaaatccctcagccttgttcttcacgactgtctatactgagagtgtcatgtttccacaaagggctgacacctgagcctggattttcactcatccctgagaagccctttccagtagggtgggcaattcccaacttccttgccacaagcttcccaggctttctcccctggaaaactccagcttgagtcccagatacactcatgggctgccctgggcagccagcattcattgtaagttccctctttgaaaactggtgtgtgggtgttcagttctgtgtctggtgggtatggacagacagtaatctcctgtgatctgtgctagctgtgaggcagctctggaacgtgaagagctgtttggtttgaaccgtgaacaaaactgtgttttgagtttagctgacattaaagaaaaaagttcatcacgtgactgttaatgtaaacctggttattaaaataactatgaaatta

SEQ ID NO: 103 - DNA, 5426 bp, Homo sapiens
ggggaggaagaaaggcgaaggcaaggcgaaggggtggagagtgatatgaagagcgagagaaaagagaggacagcggacgagcagatccggtatctggaatcccggcgcctagaacgtgtttttcgggagagcaaaggctgtgtctacggcaggctggggatatagcctctccttccgatgaaaagagaaaggaagaatggactacagccaccaaacgtccctagtcccatgtggacaagataaatacatttccaaaaatgaacttctcttgcatctgaagacctacaacttgtactatgaaggccagaatttacagctccggcaccgggaggaagaagacgagttcattgtggaggggctcctgaacatctcctggggcctgcgccggcccattcgcctgcagatgcaggatgacaacgaacgcattcgaccccctccatcctcctcctcctggcactctggctgtaacctgggggctcagggaaccactctgaagcccctgactgtgcccaaagttcagatctcagaggtggatgccccgccggagggtgaccagatgccaagctccacagactccaggggcctgaagcccctgcaggaggacaccccacagctgatgcgcacacgcagtgatgttggggtgcgtcgccgtggcaatgtgaggacgcctagtgaccagcggcgaatcagacgccaccgcttctccatcaacggccatttctacaaccataagacatccgtgttcacaccagcctatggctctgtcaccaacgtccgcatcaacagcaccatgaccaccccacaggtcctgaagctgctgctcaacaaatttaagattgagaattcagcagaggagtttgccttgtacgtggtccatacgagtggtgagaaacagaagctgaaggccaccgattacccgctgattgcccgaatcctccagggcccatgtgagcagatctccaaagtgttcctaatggagaaggaccaggtggaggaagtcacctacgacgtggcccagtatataaagttcgagatgccggtacttaaaagcttcattcagaagctccaggaggaagaagatcgggaagtaaagaagctgatgcgcaagtacaccgtgctccggctaatgattcgacagaggctggaggagatagccgagaccccagcaacaatctgagccatgagaacgaggggatctgggcaccccaggaaccgccattgcccataagacccccaggaagctaggcactttctttccatggaaacatttagacacaaacctccccagctccggccaagccatcatttgctacctggagctggatgtagaagtcagcagacagctccctatccctggacccctgccctccttttttctgctcacaaggacttttgattttagttataaggaggacccaaaatgtgtgtgtgtacatgtgtgtgcacacatggtacgtgtccatgtgcctacctgatactttcacatgtaattaaattccaggcaaccagcacaagagccgtgagcttggcacatgtgctgctcgtgagcaggaaaatcagaggagccactgatctgagtggtatttaggttgaaggaaagatttctcctctcaagtgccagggagcagccacacgtctgtctgtgtttagagagggaagagggttctccaggttcaccatttgggttgtttatatgttggtagaaattctccctgtatgcctagaaggatcagtgaatgtaagagccttggaaattaacaaaataacagccacataaccttgcggcaagtctgatggaaagaaaaagataaaccatccgtggggtagatgcaataagcccacgtatttttacactggaaacgttgattgttttaaatgacaaagacatatgtgatgttctatgtggaaacctgtgaagagtggattctgcctccatctctgcctccatggctacctttaggagacagagaagatcctgtgtgtttctctgtacccagctgacagcctgtctctatggcgcttccttgagtggaaggaaatgtctcaagaaacaaagatctcgctggtgcgtacacagtgctgaccagctagtgtggccagggcctggtggcctggtggccaggaagtttcaggttgaagggaaatgtcgaggctacctgcagatatgacaggtgccttgaacgcagcccatcttcatgtcatcaaaggtcttcctgcacttgaagctggggcgatgtttgcagtcaagaccattctttccaacctctgggttcttgcaagttgccctcaccttgtgtgtggagatgcattccaagaatgaagcctcatcttgctactgagtgtggggttcagggaagctctttaggccacctggtgaaggtgcatggggaggatggagcttctcctcagctcctctgagcagccacctatgtgatctttaaatccaaccccaatgggagaaaagggcaagaacagtctgtgccctgggactcctatcaggaagcttgacaggcagctgggcatcagtgcagctgatatcgtttgaggagggagacagatgcttggacctgggtgcctggctatggagattgaccaagcaagatcaggagctcctgatagcaggcgtctttgagcctagctggggtagaggcactgcccatctcttctccaccttctctccacagaatgtttgcagagctgggcagttgaggaaaggacagcccctggttggtgcctccaaaggaaggtggacttttttggtggagacgtttctgccctgggcaccctcctgcccccgattcatacctatggcttcttgagaaggctcacagctgtggtcttaacgtagactgcagaaagatggcatgcggcccctggcatttcgccaagggttttatagcaagtctccttcctccatagggacagcagcaccagccctgtggggcatggagtggaagcccagaagggcttctgcaagctgcacagaactggggtaagaagacaaagagtagccaccgggagaggcttcctttgttacagctgggaaagaacagttctgtgaatgcaaacacctcctgagttttgcaattgagaaaatgatttggagaacttctcttctggtaatttttattttgaatgttcagggccttagttggccccagtaattctccttggaggacttgggagaagaatttccacaaagcaaactactaaccactagctcttactggacagcgatttctggcttataagagttctctttgatttgcactagcactacgatagtgttagatggggaaatactgcaacatgtccagttggccagatcactttccaagggagcgatactaaggcagactcagctttttaaagatgggaggtcaggaggtggaagtgagaggagatcccatctcacacaacacacttccacgtaatgcagaccacacttttccattttgtcctgccctcttgagaggtcatttctcacgtcctaagaacctgatcagaaattttggaagggttctttgaaatagcagcagttgaaacagagacactttgccacagtgtggagcagattttctcactggtatcacatggtcttgcagttttgaactcttcgaccgatttgtgggagtttatgtaattgcgtgcaatgaacctgaaattgtgtaaaggacaaaagaccagtttatagggttgggttttttttccaacttgtgaaaagcagtttagctgcatctgtctccccaccacccccaccccgggaggggcttatgttacaaggtgatcaagtgaaggaaaaacctgagcctatctggctgggatggtggaattaagcacaaggtcacattctctgtgatcacatgagagggaaggtgatgacttaaatggcagggggtggggattatcttggggagaggctgaaaagcacaaaagatagtcttccctgtacgtattggtgaagaacgtgcacaaggctggatggacttcaacttggagttgagttgaggcaagaggatttctggatattagtcacccatctgcaagaaaaatgctgaggcctcgggtcaagattttgatctgagacatgctgatgcttcaaggagaaatattttcacaatcctctcttccctcaccagaagagaacagtactctctcctagaaacctctaggtaaacacattttatcctaatatcggtagcatataatgccccccccaaaatatctgttttccatgcaaaaaagtctcaacaagaagtctgtggagttgagtggttacttcaaagtgtcaggagagtgaagaaattggccacagaagagcaagaagctctcttaagaaaagggaattctctttaaagaaaccaccaccaacaacaaaacaaccaaaaaccatgttttatgtcaaagctctgtagcacagagaatgtggtgtcacagatacatcgccgagagaggtttctttctttcttttttttttttttgagacagagtctggttctgtttcccaggctggagtgcagtggtgggatctcagctcactgcaacatccgcctctggggttcaagtgattctcctgtctcagcctcccaagtagctggaattacagggacccgccaccacgcccggctaatttttttgtgtggttttagtagaggtggggtttcaccatcttggccaggctggtcttgaactcctgacctcgtgatccacccgcctaggcctcccaaagtgttgggattacaggcgtgagccactgtgcccagccaaaagagaaatttctacatgaacaaggcaatttcagtgtcttacagcggccaaaccatgacgtgaagaatgagataggagacaggagatcaccataagcgtccctgatatagcagcacacattttcacgtttccacttaaatcgttttgcacaaagtcttgcttcgctcagatgagatgagatatgatttcctagagatgtaaaaataagaatgaatgtggcgcccccttcttccagatgtaatagaaagctctgccctatcacaaggggggtgttgaagcgccccttgtgttttaactgtatttaactgagcacaagatgcacaagctgtggtgggaaaccctcagtttacctttggagtcttccctgcagatcgcagacctgtttccaggctgatgtttctggtgtgtaattgctagcgtttctgaagggttttcccaattgttttagccttgtgaagtattcttaattataacttgcctttcagcgatggtacatgacttgattcaacgtttggttctgaacttacacactgatgcgtttactcatctaacataatctgacagggcctcagcaagggagccatacatttttgtaacattttgatatgttttaatgcatctgacttagatcttactgaaataaagcacttttcaaagag

SEQ ID NO: 104 - DNA, 517 bp, Homo sapiens
ccaaatttcaaaaagttttattttgaaagaatgagagaaataaaacagagaggtatcaattaccaagaacaattacactgaagaaaacacaataataagtactctcccacacaaccccccccatttccccatccctggcacaataatattaaaaccaccaaagcacacctaacaaggaaaaacaacagtacgtaatgaaaaaagcaaatgtccatactgctcagtccaactaacccttatgaaatgtccttcccccagctaaaccctacccactggaatgataaagawatgtagagacaaccctaggggagacttggaactctgcttatactagcaaagctcagtgaagaatcagtaagagtagtgaatctgtttggcagtgaacactggatatagcttctttttcaaattttggatgattgcagagaacaggtagagtttgaggctcacagacttctaacaggactgatccctgttccctcaaccgtaacagtggggbagctgccaaatcctgggt

SEQ ID NO: 105 - DNA, 3184 bp, Homo sapiens
ctctgctgtgctgcctcaaacgcggagggctgcgtgcagtgggagcgggctccaggagcccgagcctccagccgtcctcagagcaaggcagcaccgaggcctggccacagcaatatccatctggaagctcttcccttcactcccaactctgaggttgcctaactctttattaaaaattcagaagggggaatgccagcccctagcatggactgtgatgtttccactctggttgcctgtgtggtggatgtcgaggtctttaccaatcaggaggttaaggaaaaatttgggggactgtttcggacttatgatgactgtgtgacgttccagctatttaagagtttcagacgtgtccgtataaacttcagcaatcctaaatctgcagcccgagctaggatagagcttcatgaaacccaattcagagggaaaaaattaaagctctactttgcacaggttcagactccagagacagatggagacaaactgcacttggctccaccccagcctgccaaacagtttctcatctcgcccccttcctccccacctgttagctggcagcccatcaacgatgccacgccagtcctcaactatgacctcctctatgctgtggccaaactaggaccaggagagaagtatgagctccatgcagggactgagtccaccccaagtgtcgtcgtgcacgtgtgcgacagtgacatagaggaagaagaggacccaaagacttccccaaagccaaaaatcatccaaactcggcgtcctggcctgccaccctccgtgtccaactgagctgcctgctccttctcgataatagccgtctcctctttatcatgctttttccccctgttgtttgtcaaaaaaaattgcctttaaattcctgggtgtttggttgtttgagattccttccttgttatcaagcctctcggacaaaagggctaggaaaaggtgatatgtctcctgatcatatcatacccattaagtataacccattatttagaaggttctagggaaaaaagtagtattttcttattaaacaatcagcacagcctatatctttgttctctcatgttgatccaagccagagacatcggtaacaaatagcacctgtgttgtttgtgaggtgtttcagtcccagtcctgatgtgtgtgcgttgttctctcctggccacttaaataggaccatatgtaaacttgactttgactgcatgagatatccctatctggtctcactcagtcctctgcatcccaacattcccaggacatgcatgatcaccagcatttattttcattatttgaggatatcttataactcacagattgtcagcatccagccatgtcctatctagattaggaaaatgatcagaatattccagctcaacaagtctgggtatactcactattgtgagtcaatacaccatagctctgttgaaattcctggaggcaaaattgaccttggccccaaagatattcctcaatagatttcaaacaccactcccctgtagaactctcccagcctcgttggggaggcttgtccagggtgatagagactgatttcagacaaacctatttattacaaaagtttcatggtgtctgaatgattgttttctctctttgtatatttgtacaaatgtttcagctgtgcttttaaaaaatctggatgttttttatttagtgattgttcgacaattagctgcttcaaaacataatgtgcattgcttatgaatgccttcatatactaatacagatactctgataatattacactctaataaggataatgctgaattttgaaaggacacaaaacatctaatgccaatatatacatggttagccaacatctttgctatcaagaccacttgttttaaataaagatgcaagtgtcagttgtagattattgggatgaagctaaatccccagaatgcagcagcagctgagcatgttaaaatggggaaggatgatagctacatgtatgccggtcctactcacgcgacacccgtgtgctcaaaaaagttacttgtttttgttacgtgtgattttcctatttctctagcccaaagtgcattacagaagatacacctatagaaccattaccttctgctatgtgtgccagggctcatctactcctgtacattaatggattactttagatgcaaatgcagattacaatggagtggggaagtactttcattacccaagcctcagaaaaacacacaagaacaataacacagcaaacagattgagggattgttgtggtttttgactaaggtgtatgttagtttcatcagaaacttaaaacatagactgatcactcagaaattaaagtccgttttactgtgaatatagcaatatagtactggacacagtactggtgaaactgaggagagcattgcttgtaaaatcctgagtttccataaggaaaatgaaaactccttttaaaaataaaatctgaggagtgtacaataagcatatgctttgactttcctttgctgtggaggtttttggtttttcattgatgataaacgactacagacttagtagtggagaaatggtgtcctctagtggaagaaatagtagctccgctattcagatgcagagcactgcagcatccagcctttcaaagctgactcttctcaatcatctgtgggtcatttgacttgattttttaagctaccctgaatttccagaatgcaggttctaaagaaatctagatgagagaaagtatttgaaaatgatttttaaatgttttttaaaagacacatctgacatttttaacaacttagtaaaagttgaaatgaccattctgtgtagtcataaaagaaacacaatgaagtgtatggcctctggagttagtcttagtaaaacttattgctctgtgtcaatgttaacctgtctcagatcaagtaattccttcactaggttgggtttggggaggggggaaaagaggggcttttcctaggagaacgataagaaatggaaagactccttgaagtgttgcaagggaacctcctagcactgtgaaagtcagaatcgcctcagcatttccatgacgcacattatgcaaatctctttagcactattttaaggttgaaaactttaacaatgaaggggaaggggaagatttccaccaactgaatcatttgtgcacgtgtatagctcaaagagcttagacttcaaatatatctggtgaatg

SEQ ID NO: 106 - DNA, 5076 bp, Homo sapiens
gcggccgcagcctcagcaccgcagagcggagagcggagcccggagcccgccgccccaggatggctgcagctcctccaagttactgttttgttgccttccctccacgtgctaaggatggtctggtggtatttgggaaaaattcagcccggcccagagatgaagtgcaagaggttgtgtatttctcggctgctgatcacgaaccggagagcaaggttgagatttaagttctcaaaggtggctgcaccaaatcccatcccaagtgcccttcttccagtgtgaagggcactccttccacgaagagggaaagtgcacttacatttcaatcgaccaagttccaaggacctatgccataatgataagcagacccgcctggctctggggagcagaaatgggagccaatgaacatggagtgtgcatagccaatgaagccatcaacaccagagagccagctgccgagatagaagccttgctggggatggatctggtcaggcttggtttagaaagaggggaaacagctaaagaagccttagatgtcattgtctccttgttggaagaacatggacaaggtgggaattactttgaagatgcaaactcctgccacagcttccaaagtgcatatctgattgtggatcgtgatgaagcctgggtgctcgagaccatagggaagtactgggctgccgagaaagtcacagagggagtgaggtgcatttgcagtcagctttcgctcaccactaagatggatgcagagcatccggaactcaggagttacgctcagagccaaggttggtggacgggagagggcgagttcaatttttccgaagtcttttctccagttgaggatcatctagactgcggtgctggcaaagacagcttagaaaaacaagaagaaagcatcacagtgcagactatgatgaacaccttacgggacaaagccagcggagtgtgcatagactctgagtttttcctcaccacagccagtggagtgtctgtcctgccgcagaatagaagctctccgtgcattcactacttcactggaacccctgatccttccaggtccatattcaagcctttcatctttgttgatgacgtaaaacttgtccccaaaacacagtctccctgttttggggatgacgaccctgccaaaaaggagcctcggttccaggagaaaccagaccgccggcatgagctgtacaaagcccacgagtgggcacgtgccatcatcgaaagtgaccaggagcaaggtcgcaagctgaggagcaccatgctggagctggagaagcaaggcctggaagccatggaagaaatcctgaccagctccgagccactggaccctgcggaagtgggggaccttttctatgactgtgttgacacggagattaagttctttaagtgaagtaagcgttccctttccccttcttatttaagacttcccaccttactaaattaccagcaaaacaaaccactctcctgtttgagtaaaatgagaaagttaatatgtggcctccttttctgaagccagatcaaactgttaccttgtgttccaccttgaatctcacagcgtccccttctgcaatgtaggtctccttcctgtgcagtgtaacatgtatcccgttgcctgttgttcggttgtgtgactaattgtggattttaagctgctattattgtatttcagtggcaatggacacattagccttttacaagaggactagagttcatcaagccttgaaaggcaggcttcacagtgccgagttggcgggaaaagcaaattcttttgaagtcttagtctttccctcagtagcggtttctttcaggttaacaagaggcatttgtgcacacacacagggctcttgtgtgtgttgtcaaggggaccctccgtggcctcccgtgagtgcatgcctgtagtgcacagtgtctctacaggtgtcttctggggggcagaaccaattggaaggaagaaagggacccctctccagtcctggctccttcctacatcctgggctcctgaagaagctgtcttcccattttccatgcgctgtgcttatgtgtggtggactgcagagctgcttccacttacaggagagctgataatttgttagctggaacctattcacttccgagattcagacatagccatgctggtggccttctgaatcactgcatggatgtcccaggaggcagctctccccacacagcagcacagccatcacaggattccttgtgtagaaatgattcccagtctagttaccaacagctagtctaggagtaattgaatggccctatggcacagttccacccacagagtagtgaatctctcagccaaggagggaaagaaaaggaagaactcttgactatttagattctagttaaatatctggaatcctagcagtcactacattatctcagcagagagactttaattaaactgatttgtttccaatgtcgggttcacttaaaggatttgacttaccaccagagcatagaaaagcatgcaaggaagaccagatgggcttagcattgggaagacagagggcaaggaggtgatagatggatatagaagcatttctctgcaggataccagttcaggccccaccattcctgccaaggccattacatcccacaaacccaaatacaaagcagctgacttccctggatcttccccccactcctcacacctcacatgtcccaggagctgccttcattcaggcgggtagctgcactgggcatggggtggtggtgggagcttaccgccacctattcaagctctcagctactcctgaaacgggcagagatgatgaacagaagtgtatgtaaatacagcagctagtgggagagcaccagttgggcctaatcctgcctcatcattcttggcaggaatctgcaaatggaaacattgtgagtatcagcaatctgggaagtgacagggttaataactccttcccagaagctgtatcatgagattttgaggggaccgagccctgttacatggatgtgaacagtgaggatcagaggttttatcagaacacattctttttttctaccaactctccagagcgtgagtataggagtgccatgagctttttagtcagcagttttgtaaactctgtatataaaatcattaaccacacattgtgggtgatgggaagacgatttcagctgacagagttaatggcaaccaataatggtggcctgtagctgctaagagcttcacgcaggtttggcctgggctttcactgttggtgaatttagagtgtccttttaggtggggcggctattctaaaagtgtctttctatcactgttaagggggggggaaagtgaggttcgaggatgacgtaggtaactctcccctcccaagtccatgttccaagtggctatgtaaagcaagatgatacagaaagctgctctaaaatctcactgagtgatttcaccttcgcctactatgaaatgtctcatcagacctgacatgtctgagataaccaaggtgattcaggatttgatcaaaagaagtctagtaagaattaattacacagaagcctcctttcatttctatgggccaaacaaaggccatggataaccctacccgctttatgtcattacccattgggaaacacaatggctacttctgttagggtacattgaccttggtcaagcatcttaaagaaggcaaccctaattgagagctgtcttggctaatactctgcaccacaattgtgatgtcctagtcctaccactagagggcatggtacagcctggcaaaagttaaaaggggtgtggcagctcccatcaggtctggaggtggtctataagcacagttgacagttgtgcattgggatgggtggagaaagacgacaagagagcagagaatctgctgatgtggctgcgcttacttttagtgactttatgtacttatattaacagctggaaataggttgttgggttttgagcaggctgttatagtgaggaatgttcatttttaaatgttcctaacagattttgcttttgaaaaatgcttgttacatgaataatttgtggaccagggattgcttttctgaaggcagtatagggaacatgaatattcaagatgaaatacaaaaattatgtttaagggtcatagtgtataagtagcttcctaggaaaccctttgtgtatcttttcagactggggtgggggctgagcatgcttgtgcagaaagaagccatagccagaaaggacagaatctctcccccactcccttgccccataaccaaacataagctagctagtcttgtctaatagatgggatttactataggtgaagatagccctcatattcaaggacagaagctctggcaggagtaaattagcaaagcagaaatagtaccctttcattcttggaggtgctttgaaattttaggtagaatataatcgaaattatggaggttccttagtgctcaataatataagacctggtgttattagaacgagtctttcttataaactaacagagcaggtatatgcctgttagaccttagctgtggggttcctttactattgggtgaatcattaggtataaaaaataatcatcaaccaggcaaattactttgcttcctagctgatgtcatcccacattggtacaggtgttattcagtactgggtggttcagcagggaagccgggtgggaccagtgtgtctgtcatgaaaccactaactgcattcctgactgaagagccatctgtcatttattggggaaggtcttcagttgagctctcagccttaggaaggaagcacgtggaggagggacggaggaggttcccttgctgggcatgcttcgtagagggccaggagcagcaggtcatgtgcacatgccgttgcagcacaagcttatgcttcccgtagccgtggcttttcattctgcacagtcccaggtcccagctcccctcttatggtttctgtcataatgtgctttatctgattgactccaaacatcccgaaatgtcacctgcagatttctcgtgggaaccaatatgtacatgtttgcaattatgctgtgagaatttaaatgtgttagatggaaaatgctattggcagggaataataat

SEQ ID NO: 107 - DNA, 4249 bp, Homo sapiens
gggaaagcgaggagccgcggcggcgtggagccggcgggcccgggcgggggctccccggagccctaccaccccaccctgggcatctacgcccgctgcatccggaacccaggggtgcagcacttccagcgggacacgctgtgcgggccctacgccgagagcttcggcgagatcgccagcggcttctggcaggccacagctattttcctggctgtgggaatctttattctctgcatggtggccttggtgtccgtcttcaccatgtgtgtacagagcatcatgaagaaaagcatcttcaatgtctgtgggctgttgcaaggaattgcaggtctattccttatcctcggtttgatactctaccctgctggctggggttgccagaaggccatagactactgtggacattatgcatctgcctacaaacctggagactgctccttgggctgggccttttataccgccattgggggcacagtcctcactttcatctgtgctgtcttctctgcacaagcagaaattgcaacctctagtgacaaagtacaggaagaaattgaagaggggaaaaacctgatctgcctcctttagtttggaagagacaatgccattttctcccttgagtaatcttgtgaaacagtccacagtttcatcatttgagtcaagtggagaactaacctttacctaccaaagccacgttccacggcccgaggcttaaacaggaccaatgagaggccacatccagctacgcaaagttactggacatgcggtctgcagtgcacattataaggaatggaacatgaaaatagtatataatcctagacctggagttgccaagttctgtcagactccatctcccccaggttcaatgatggatgataatctaaatcattagggcagcagtttctctggtaacggaagagaccgtccgccagatctgcaggctgtttctgctccaacactgcttgcttgtgagcatctctgcctcagaatggggttttgggttggagttcttgttttcctctgttctttcaagttgtctccaacgaacagaaaactataaacttactggggacaggatgtgtgctaaagggcacagcaagacactgtcttttgcttagctgaccaaaggggtcagcagggatggcgtggagtcatgctgtggaacttattctaggctgaatcctagggtaaggtggatcaactgaactgtcactccagagattttagaaatttgagtaaagaaacaataaggacctatacaatcatatgagaacaaaaatatgaaatcttgctagtgaagacgtattttttcttcttcccagcagccaggctagcaccagttctggcccagtctcctcttcttctggagatcacatgtttttcttctaaggttaggattgtgctttgactgcgaaaggaaacctcactgtttcctccttccagggactgaggtctccaagctagctgtggcttatgcagatgttcactgggaggacctgccagaatctcggcacttggggggagacctttactcccagtttggtgaccatgctgtagtcagctctatttccaatcccgacagtagcagaatggcattctacaacaaaaagaagctagttatgggagttaagtttttgtagttactggtgttgatcctgaaagcagactgagataacattaaattgctgcaactgaagaactgcagccaagaccttaattccaggaaagcacagaggacaaagttaattcaaaaagaggcgctagatcaaggtcacagcactgcctacacctgtttacaaaaagaatcaaataccactatgaataaggattcaggggtttttaatctactttccataaattaccaatatcactgattcaggaagatagtatctcagaatgaccagagcagcacagaaacaagctactctgacattatgggagcttcaaaattgtatcatgatacagaaacactccttagcactttaagaaagtgagatggaactgccagatttctggaaggagaaaaagtgtaggtatttgggttcattaatctgctcacttgaggactttgttttgaaaaagtaccttctgtggacaaggtattgtgctaccagctatacaaccctgacttcagagtttgcaaccttgccctgagtgaatcatgttaaagctgtctgagtctaaagcaccgtatcttggtgcagaacagataattatacagagatggaatgggacaaccgcagttttactacattctggtgtttggcctatatgagaaaccatcttctcacagattaagggctaagggcaaaaggggtgggaggtgtggaactagccttaatgagtttcccattcctgaaccaaaattcaaagtgagtgagatgtaaatcctgtgattttggtgaagaaaaaaacgggtatcttcatagcagcctaggaaaccttaaccatatctctaacaccacacagaaagaggctggaggagccactggacaaagcttctgtctctgtgtgtacatttataatgttctaaccaagtctcaaaccttgatgaaaaacacaaaatttttccataaacttatcagaagactcacttttctttctttcttggatagagaaaccattttctgacactaggtttacaatctcagtgtccttacaagttaagtcctaagctcacaggatcctccgagcatgtccatcacctgctctttggctaaggtggcagtgtacctctagatcaacctgggaacagtcacaagggagtgtgacttcttggccataataaactcactcgatagtgtttatgttattaatctgaatgcaacagaagacaaaagcacaggcatgcacacacacagaaccccaaaccactaaaaactacctaaacactgacttagtaaatagtaaaaaggtaatgttgggacttttaaaccttgaatccattagccaggcttgggatgaaaggaccatctaaaatcatgctagtctaaaccatgctcttccacacagctgtttaaaaaccactgggtatgaggaatatgctagaaagaaatgttaaaaatagattgttggctcacacttatttttctaataaataggaccattattactaccaggaaagtcttatttattttgcctgaaattggcttaaagaaagtctcatgacgggatgggatgggctgcgcttctcaatgaactctgaggcagaaatatttgccttggattctgtggattctttaaacctgtgtgctaataattcaaacaatgttgcattaattgtataagggtttttgtatagttttcaaacatctgtggtgtaatgatctttgttaaacatatattctgtaaagtgccatagtctttttttatgtgtagcatatttaaaaatatatatgtatattatacatacacaagtttgtgtgaaagatgtgcaataacaaaggtgtatgtatgttttgttgttttgttttggaaactggacaggagtcaaaacagggatgtttgtttctgttttggcaaaggagagttccacatttttgccttcatggcttattcagtaacccataattttaatgctacacaaatcttatgtgaagaaaagactggtatgaaatcattttttcctgggtctaaaataatcgctagtgttatgtcaaagttaagcccgcacgccaggcccagttaatgctagtctttcatgtgaaatgtgaagctgccatgttgccttttctcttagtaggataactagtagctggtacataatcactgaggagctatttcttaacatgcttttatagaccatgctaatgctagaccagtatttaagggctaatctcacacctccttagctgtaagagtctggcttagaacagacctctctgtgcaataacttgtggccactggaaatccctgggccggcatttgtattggggttgcaatgactcccaagggccaaaagagttaaaggcacgactgggatttcttctgagactgtggtgaaactccttccaaggctgagggggtcagtaggtgctctggagggactcggcaccacttgatattcaacagccacttgagccaaatataaaattgtatttacagctgatggactcaatttgagccttcaaacttgtagttatcctattatattgtaaactaatacattgtctagcattgatttggttcctgtgcatatgtattttcactatgtgctcccctccccagatcttaattaaaccagattttgcaattc

SEQ ID NO: 108 - DNA, 6060 bp, Homo sapiens
atctcactgaggaccaacctttcgacattcttcagaaatccttgcaagaggccaatatcactgaacagacattggcagaagaggcatatttggatgccagtataggttcaagccaacagtttgcacaagctcagcttcatccttcttcatcagcatcctttactcaggcttctaatgtttctaattactcaggtcagacgctgcagcctataggggtgacgcatgtgcctgttggagcatcgtttgcaagcaatacagtgggtgtacaacatggctttatgcaacatgtggggatcagtgttcccagccagcatttgtctaatagcagtcagattagtggttctggtcaaatacagttaattgggtcatttggtaatcatccttccatgatgactattaataacctagatggatctcaaatcatattaaagggcagcgggcagcaagccccatcaaatgtgagtggagggctcctggttcatagacagactcctaatggcaactccttgtttgggaactctagttccagtccagtagcacagcctgttaccgttccatttaacagcacaaattttcaaacatctttacctgtgcataacatcatcatacaaaggggtcttgcaccaaattcaaataaagtcccaattaatatacagccaaagcctatccagatgggtcagcaaaatacatacaatgtgaacaatttgggaattcagcagcaccacgtacaacaagggatctcttttgcttctgcaagctcaccccagggctcagtagttggtccacacatgtctgtgaacattgtaaaccaacagaacacaagaaagccagtcacctcacaggcagtgagcagcactgggggcagtattgttattcattcccccatgggccaacctcacgcaccccaaagtcagttccttatacctacaagcctttctgtcagttccaactcggtacaccacgtccagactataaatgggcaacttcttcaaactcaaccctctcagctcatttctggccaagtggcctcagagcatgtcatgttgaacagaaactcttccaacatgctcaggaccaaccaaccatatactggaccgatgcttaacaaccagaatactgctgtccacttagtgtctgggcagacatttgctgcctctggaagtccagtgatagccaatcatgcctctcctcagcttgtgggtggacagatgcccttgcagcaggcatccccaactgtattacacctgtcacctgggcagagcagcgtttcccaaggaagacctggcttcgccaccatgccatcggtgacaagcatgtcaggacctagtcggttccctgctgtcagctcagccagcactgcccatcctagtcttgggtctgcagttcagtctggttcatcaggatcaaactttacaggagatcagctgacccagccaaacaggactccagtaccagtcagtgtgtctcatcgtcttccagtttcttcttccaagtctaccagcaccttcagtaacacacctggaacaggaacccagcaacaattcttctgccaggctcagaaaaaatgtctgaatcagacttcccccatttctgctcccaagaccacagacggcctgaggcaagcacagatccctgggctcttgagcaccacactgccagggcaggattctggaagcaaagttatatccgcatccttaggaaccgcacaaccacagcaggaaaaagtagttggatcatctcctggccatccagctgtgcaggtggagagtcattcgggaggacaaaaaaggcctgctgcgaaacagctaacgaaaggagctttcattctccagcagttgcagagggaccaagcccacactgtgacaccagacaaaagtcacttccgatcactaagtgatgcggtacagagactgctctcctaccacgtgtgccagggctccatgcccactgaagaagacttgagaaaagtggacaatgaatttgagacagttgccactcagctcctaaaaaggacccaagctatgcttaacaaatacagatgcctgctcctagaagatgccatgcgaatcaatccctctgctgagatggtgatgatcgataggatgttcaaccaggaggaaagagcttccctgtcccgagacaagcgtttggcacttgtagaccctgagggttttcaggctgatttctgttgttccttcaaacttgataaagctgctcatgagacacagtttggccggagtgaccagcatggcagtaaagcaagcagctctctgcaaccgccagccaaggcccaaggcagagaccgagccaaaaccggtgtgacggaacccatgaatcatgaccagtttcatctagtgcctaatcacatcgtggtctctgcagaaggaaacatttctaaaaaaacagaatgccttggcagagcactgaaatttgacaaagtgggcttagtgcagtaccagagcacgtctgaagagaaggccagccggagagagcctctgaaggccagtcagtgctctcccggccctgaggggcaccggaaaacctcatccagatcggatcatggtactgagagcaaactgtcaagcatcctagcagattcgcacttggagatgacgtgtaacaattccttccaggacaaaagtctgaggaattctccaaagaatgaagttttacacacagacatcatgaaagggtcaggcgaaccccagccagatctccagctgacaaagagcttggaaaccacatttaagaacatcttggaactcaaaaaggcgggacggcagccccagagtgaccccacggttagcggctctgttgagttagatttccccaacttttctcctatggcttcacaggaaaactgcctggaaaagttcatcccggaccacagtgaaggtgttgtagaaactgactccattttagaagcagctgtaaatagtatcctagagtgttaatagcagcagtcctccccctaccccgccccgagaccccaccccgagaccccaccccggaccagttacattcgttcctggcaaaagcaaatggaaatggtctcctgtctccagcctgcttgatctttcatcacaggttattctttctaatctcaatcctgttctttgtttaagagcaatacttgtcgtgattacagggagatcctttagtaaaattaatccttggcagaaagcagtctgataggccccactcatttcaagtgttatgaaagtgcttataggcattttgtttatttgttttgttttttaaaaacactgtaactcaatgagaccacagtatacttggcccttggtaaaattttgacaatcataagtcatttgaaaagaacagacttactaaaatcaaacgagacggatagaagctactttttaaagaatatcccactgcatctgcaaatttagttttgggtttttttattattattattttgagtttttttgtgtgtgttttgttgttattgttgaggggaagaccacatggttcttccccctcagccatctttgagcagtaaattgctggctgtgctgccagggacccgcagccctggtggaaaagccagtagcacatacgcagggcattgcagggcttccctattgatggttcaagtgcttttctgatgcttccggagcaaaacctcatgcttttaggcatatctatgttgaatttcacctagggaatgttctgttcttagttacagcagcaaaatttgaaataatttcaccaggctaaataaaggaaaatggaaaccagttaagaggcacagtgtacagaggaggccgggatagagccatgagggttataatattaatatgtatatatgtaaaagcatatatatgttaactattgagaaaaaacaagttttgcattttataattggatatagtcaacatataatgtatgtttttgtttgttgctggattttgtttcatttaacctctctttgcaccctctcccacaacaaataccaagcatcaaaagcactttcatttgaaaattattatgttgtaatttttcagtttaaactttaaggagactctggccttgtttatgcttcttgtctgagaacagtagtgacccctggcagcaattcattaccaaaacacagacaaaccaaaggtaaccagctagcccaccactgaaaggaaagatctgagacatgggattcccatttgagagccaaaggatatgccctgtcatggtttctgtttggcctgtgttcatattagtgagcatggcttactgcttttttttttttttttttttgtcagggagtattctccgttttcctttctcgtatacctgccccaggttatcccatttctgttgttacctttattcttaatgtcattgtaaccatcacttatctcctctcattgggaaagctacatgatagtatttttatgcactcttctcccacacatacacacacgtgcatgtatctgagctgctcggatccagaggtcatttttgttacagtgtgtgcacactcactctccttcttagtgtgcatactctctcatttattctgtttatctccctggctctggaggtgcagccactggtcttcactttaatgtgttgccagaatctgcttctggctgtcgccaacatggggatgacccccattgtcatcatgttgggcatttcttttccagattggcctgtgatggaaaggaaggcttctaattagaaaacacagcaacagaagacctataccccggtgcccctgtgtcccactacacacagaaaaccctgtgagatggccagtcttcataatagcaacgtaccttcaccccagccacatgccccagccaatacaaattggaaaatctggcccattttagggttaccattttttccttatttgtgccaatgtccaagttgcagatttcccctttttcctgtattgtaacatattagataagttggtgtcgccagttggtactttctgtttgggtagtcctagggtaacaccctgccctaaactccatgatttcataggcttttcttcccttggggctcatgctcccctaattcctagcaagatgatccttcctaatcaaattcttctcattgcagaactttatccctggaagccttcatgtgggctgctagtgagttacattaattactgcaaatcagtggaattctcaagagacaagataagcttcatgtacatttgtcacctctctttcttccctatcctgccctgctgtcccaatcctagcttttctatataccatcttaaagggtttttaagccctaacacttgtctagcaaatggagagcctaatttaccaaaatgaaacttgtaaatttttgtgtcattgtatgtaagtttactttttatggaggaaggattctagataatgacaaatgaagattatgacatgtatttcactcctgtgattaggttctacgcacatgggtcataactcgcatgtcgagccccctctagtgaagggtaggagagctcagcctcggatggccaacattcagttgttcaggttcattcgtcaaagttaagttttagaactatttgtactcagtaacaaaaatcattttctttttttttttttttttctgttgtggaaaagcgtgaatttgttattaagcatttgattttctgtgtccttaagtacttcctgaagatgaagcaaaattttaatctggcaattatgaaaaagaaatattttagctctgaaggatttagtagattctgttagattagggaggccttacagactgactttacttaaagaggacgcgtcactcgctgtcagtgtggtgtgggctttatttgcttaaataccttcatttgtatagtacgtctcacttgaaattgctttgtatacattttgtaaaaatatttataaaatgttttgtaaaaaaaaaaaaactataacaaattgcagtttattttgttatgttggataaatactgttaaaagaaaccagtcagtaactatattgttaatccatggttaggaaatgtttagttggagattacaaattgaaacaaccattgcaatacagccaaagatttggg

SEQ ID NO: 109 - DNA, 7071 bp, Homo sapiens
gccgcctcctcggccagtggcgtagccgaatcggtgtcgcggccagccagataggggcggaggtccggaacccagtctggacccgagcggggggccatggagaaagcggcccgaggcgctgtttacaccgactagcgcgggcccgttgcggctgcaggcaccatggaccgagcccccacggagcagaatgtcaagctgtcagctgaggtggagccatttattccccagaagaagagtcctgatacatttatgatccctatggctctcccaaatgataatggaagtgtttctggtgtggaaccaactccaattcccagctacctgattacttgttacccatttgtgcaggaaaaccagtccaatagacagtttcctttatataacaatgatatacgatggcaacaacccaatccaaaccctactggaccatactttgcctatcccattatatctgctcagccgcctgtttctacagagtatacatattatcagctgatgccagcaccatgtgcccaggttatgggtttctatcatccttttcctacaccttactccaacacctttcaggctgcaaatactgtaaatgctatcaccacagaatgcactgagcgtccaagtcagcttggacaggtcttcccattgtccagccatcgaagcagaaacagtaacagaggatcagtggtcccaaaacaacagcttttacaacagcacataaaaagcaaaaggccgctggtgaaaaatgtagctactcagaaagaaacaaatgcagcaggtcctgatagtcgatcaaaaattgtgcttctggtagatgcttcacagcaaactgatttcccatcagatatcgctaacaagtctctctcagagaccactgcaacaatgctctggaagtccaagggcaggagaagaagagcatcccaccctactgctgaatcttctagtgagcagggggctagtgaagccgacattgacagtgatagtggttactgcagtcccaaacacagcaacaaccagcctgcagcaggggctttgagaaatcctgattctgggaccatgaatcatgtggaatcatctatgtgtgcaggtggtgtaaattggtccaatgtaacttgccaggcaactcagaaaaaaccttggatggaaaaaaatcagacattttctagaggtggaaggcaaactgaacaaagaaataattcacaggttggattcagatgccgaggacacagtacttcctcagaaagaagacagaatttgcaaaagagaccagataataagcatttaagctctagtcaatcccatagaagcgatccaaattctgagtctttatattttgaggatgaagatgggtttcaagaactaaatgagaatggaaatgctaaggatgagaatattcaacaaaaactttcttctaaagtattggatgatttacctgaaaactcaccaatcaatatagttcagactccaattcctattaccacctcagttcccaaacgtgcaaaaagtcagaagaagaaagctttagcagcagcccttgccacagctcaagagtattcagaaataagtatggagcaaaaaaaattacaggaagctttatcaaaagcagctggaaaaaagaataaaacacctgtgcagctagatttaggggacatgttagctgctctggaaaaacaacagcaagcaatgaaagcacggcaaattactaacaccagacctctgtcatatacagtggttactgcagcttcttttcacactaaagactctactaatagaaaacctttaaccaaaagtcagccctgtttgacatcctttaattctgtggacattgcttcttctaaagcaaaaaaaggaaaagagaaggaaattgcaaaactaaaacgacccacagcacttaaaaaggttattttaaaagaaagagaggaaaagaaggggcgcttaactgtggaccacaatcttttgggatccgaggaaccaacagaaatgcacttagattttattgatgacttgccacaggagattgtttcccaggaagatactggactaagcatgcccagtgatacttcactctctccagcaagtcagaactctccatactgtatgacacctgtgtcacaaggctctcctgctagttctggaataggcagtccaatggcatcttcaacaataaccaaaatccacagcaaaagatttagagagtattgtaatcaggttctttgtaaagagattgatgaatgtgtgactcttcttctccaagagcttgtcagtttccaggaacgcatctaccaaaaagatcctgtaagagcaaaagcaaggagacgactcgttatgggtctaagagaagttaccaaacatatgaagttaaacaagatcaagtgtgttataatttctccaaactgtgaaaaaatccagtcaaaaggtggtctggatgaggctctctataatgttatagccatggcacgggaacaagaaattccttttgtgtttgcccttggaaggaaagctctaggacgctgtgtgaacaagctggttcctgttagcgtagtgggaatcttcaactactttggtgctgagagcctgtttaataaattagtagaactcactgaggaggccaggaaagcatataaagatatggttgcagcaatggaacaggagcaggctgaggaagccttaaagaatgtgaagaaggtaccacaccacatgggacattctcggaatccctctgcagcaagtgccatttctttctgcagtgttatttctgaaccgatctctgaagtaaatgaaaaggaatatgaaacaaattggagaaacatggtggaaacttcagatggactggaagcatcagaaaatgagaaagaggtatcctgtaagcacagcacttctgaaaaacccagtaaacttccatttgacacacccccaattggtaagcagccatcattagtggctacaggcagtactacctcagctacaagtgctgggaaatccacagcaagtgataaagaggaagtgaagccagatgacctggaatgggcctcacagcagagtacagagactggctctttggatggcagttgccgagatcttttgaattcctccatcaccagcaccaccagcactcttgtacctggcatgcttgaagaagaagaagatgaagatgaggaggaggaggaagattatactcatgaacccatatctgtagaagtgcagctcaatagtagaattgagtcttgggtctcagagacccagagaactatggaaacccttcagcttggaaaaacccttaatggttctgaggaagacaatgtagagcaaagtggagaagaggaagcagaggcgcctgaggtgctggagccagggatggacagtgaggcatggactgctgaccagcaggccagtcctgggcagcagaagtccagcaactgcagctcgctcaacaaagagcactctgattctaattacacaacgcaaactacgtaactcaggaaatgtcggctctctatctccagctgtggaagggttgcagccattaccttttatgcttcatctcaacattttgcactgtccagtatttaatatacgtatttaattcccaacaaatatttttgtagcttttacttgttatgatctgtagcttagcttttaattagtatctaagtgtctttctaagaactgtgtggaaaattcagatctgtttcagcttattttgtaatcaaaaacagtgataaaaagaagaccagatcttaaagaaaataaatttcaaatgcttacttaaaagacattttgaaagttaaagaacaaggttctaaggatagaagcagttatcagtgtttgcttcaggactccacctcctctactctaatttgaccaaaaaattgtttgggcttctttaaaaaagaactgggggtggagtcagaaaattaaatgaaaggctgagggtaactaagtccaccagtgttgtatgttaaaaaatcaatgcaacttttatgtggtccacaaatgtttagtcagaagtcactgattattgtaattaattagtgttgggatgggctaaaacagagccttcaaaacttcggctagcagtggagccaccatcttagattatagctagctagcctcatttgtggaaagtgatagatgctgtctataatagtgaacagtcacccatgataggacctccaggttctgtctcatatttgcttcttacttacctcaggaatgctcttgtacatagacttatttacaaaaagctaggcacatgttgacaggtgaataactgtaaccgattgtatgactgctgcacttacatgtaaactcttcagaaacagagtcttatactggtgtgttctcttgcatgcttctggttcaggactcttgatttgagatatggatttgattgagtatccaaacttgtcctgagtgcaaaactgtttcaccttttaaaaaatacctattttgcacctagccttgagcaccttccacatagcaatgaccatagttactgtcaggaggtcaaggaaaggaactttgcacaacttgtgacatgtatcctgataatcaaggcttagaggaggaagttttagaagataagagaaagttgttctaattgtgctgaaactattagatgatttagagtatacagatatgtaggtattaattctctattcactattatttatctctgcccttctctaggagtttgtatacctgcttaggagacaataaatgagctaaatgttttatttgctagtcagtcaccacctggacttcagtgactttacaagtttatgtaatggtggaagaatgacaaactatgtaatttttttgtcttccatccaactccccaccacccccaactgtcccccccacccccctcacacacatgcacacatccgtacgtgtgtgtgttttccacttacaagcttccataagcaggcacaaaactgagaaggaaggggtattatccctgccctgattatctggggcagggctttgcctcacagaggcaggagagaagaattgggcagattctttactgaactcattgggactactgtgctagttttgatgttttataatgctggcatttaattactggagagattggattcttggttgatgatttagtatttgtgaattgtgaaagttcaggagctgtgtagaaaatgttagtcaatcaactttattattgtgctaaaaggggacattcttatactgtcctgtctaaactgttctccagtatagacttcctaggcactaaatatccaatatttaaaggaacacagcaggtaaggaatgaagcctctgaaatagtactcatggatttatacatggcagatcttactgtctctacacatttggaagtgttcgttggtttaaagaaatgatagaggttttgaactactgacagtcttaaaagtgaatttaaaaactgttcatactttttatggtgtaaatttcctttgctcgatgtcagtgattcagataactcttgaccttgagatgatggcttttcacaggtttcttatattttatatctcttctgaacatgaattgtcattttagatttttgacatttgtatcaaaagagaagttgaggaaatcttcagaacactggtaacttttagttttgctatagacttcagaagtgtttatttatatgttcggtaaatgctctcgcatatgcagtacctcttctgccagcaaatccaagggaccatagcctttttatgagacaggtcacctctagaggacaccccaagaattattaaaggaaatgttaccattttgagagcatgcttaaataaatattaataatgtctttataacttgtttcctttaaattttggaatattgaattacaggctttggaggagttgtgaaaattaggaaagtttttatatattttttgaagtgggcatggttggctctttgaagacctataaagagatccagtgggaagagtaagggttggttcatcatcacaagaaataaaaaacatagtgattttttctcttaatgtgtagaggtggttttactggcaataattaataatagatttctatttcagtatgtaagcatattaactaaaatatgaattacacttccaaagttagatttctgcttcagtaggtttgtttgctgtgaagattacttctcaaaagacagatgttcatattagcttaattttcggtttaaatatgtttgtaaatgatgtaatatatttcttttgactaaatgtggaaaagtaatgtgtgttatacattgagaagtttttactggctttgactggaggttgtttttgcagagatggtattttatatgattccagtatttggaaaagaattagtcaaaaggaattcacatagtttaaatactgagaaattaatatccaaatatgtacttgtctgatttctaaataagctgggggaggagggaggggtgggaattgaaatgtgcaaatgagtagtgaatgctacactcattttcaactctttaacatgaaactgttcaatcttaacacattgttactttaatatatgtataaagaagtattactgtttgtaaagctgctgtttgcttaaaaaaaaaaaacacccttgtcatgtattttctgtatgttgggccaacaggttagaacatcaactcatttaaaaatttttatctttttttgatttaaaaaaattctgtgaaataatttatttacagacatcttcctcctccctcatcccttccaacctttacatacatcacagaatcaaccaaactgtttgcctaatctgaaatctgaatcctaatgagaaaaatttaaattttgttggcacatcacaccttgaaagtatttgtattattttataatttaatttctaaatataccacataagtttataatttaatgtcttaattgtaatgctctaataaaaaactagcaaaattagtgtgagttataacatgaagggattttcatcttttgctgtatgaaggataattgttatatcacatttggggggtaataacagcttttttgcactatgtaaatactagtggggattcttctgtactaataaaatgattattgaaatg

SEQ ID NO: 110 - DNA, 5918 bp, Homo sapiens
ccaactcctggagtcccctgggagctgccgctgcaggcccccgagccgctaggccccgccgccaggccaccgctgctgcggcagccatggcggaagttcatagacgtcagcatgctcgggttaaaggagaagcccccgcgaaatcctccacactccgagatgaggaggagctggggatggcgtcggccgaaacgctgaccgtgtttctgaagctgctggccgccggcttttacggcgtgagctccttcctgatcgtggtggtgaataagagcgtgctcaccaattacagatttccctcctcactatgtgttggacttggccagatggtggccacagtggcagttctctgggtgggaaaggcgctcagagtagtcaagtttcctgaccttgacagaaatgtacctcgaaagacgtttccactacctctactatattttgggaaccaaatcacgggactgttcagcacaaagaaactgaacttgccaatgtttacagttctgagaaggttctccatcctgtttacaatgtttgctgaaggagttttactcaagaagactttttcttggggtattaaaatgactgtatttgcaatgattattggagcctttgtagctgccagctctgacttggcatttgatctggaaggatatgcttttattctgataaacgatgtcctaacagcagcaaatggtgcatacgtaaaacaaaaattagattcaaaagagctgggaaaatatggactgctctattacaatgcactgttcatgattctgcccaccctggccattgcgtatttcacaggagatgcacaaaaggctgtggagtttgaaggctgggctgacaccctctttcttctgcagttcaccctctcctgtgtgatggggtttatcttaatgtacgccacagtactctgcacgcagtataattctgctcttacaactacaatagttggctgtattaagaatatattaataacttatattggaatggtctttggtggagattatattttcacgtggacaaacttcattggtttaaatatcagcattgctgggagcctggtatattcctatatcactttcactgaagagcagctgagcaaacagtcagaggctaataacaagctggacattaaggggaaaggagcagtgtgaccagaggattgcttcatctgatacgtaggcctaagtttttaatcaactcagaacactggcagttcctacagagacactgaggtgtcttgattatggaggaaataaccattcctttgcacttgtacaatctgaggattgattgctgccttttaaaattttatgaagagagaaacttataattgactctattttaaatatgttgtttgaattaatttatatcagactggaaaaggtactgggctttttaatttatttttcttatatgccgacagtgaaacatcagtgttttgaaagtattttatttcataatttgatatccaggtgtccctgagagctgcatatgtaatgtttgccaactggagcttcatcattcaaattgttgctgcatctggaggcagtttagcctttcctctgctggaaatgcagacgaatatgtgaaatttctcttctttgaatcttatttcttatgattgcattgtcttcatcatatcatcattccatttgccaaggaaaacaactttggcactataaaaatatgtggggctttgaagtgtattgctatctatgttggcttccctgactttcataggatgagcagagtgcattccttgaaaacatgttctttttttgttgtgtagaatggggataatgaagggggtgagaaagtaggccttttactaatttttcatctatttgacttattgattcaactaaaatgttttaagtatatgtgccaggcattgtgctaaatgctggggatacagagatgtttgcagaggtagttgaaacatctcactcctgccatagtgactcaggtaaggttgagaatttagctctgttaatctattcagaagatgtcactaagagtaagttgtttcagcactcaaaagccgcaaatctgtaaattggattaagaacacctgccctacctacccggcaatagtgtgaatccaaatgctgcaatgtgagatgaggtacaagtaaagagctgtgttttgtaaaccagtgcagctcagcattgactccctctctaagtgaaaattgcagacaggcaagtctgttttcccttgccaccttcctttgggtttggttgctctttggatgaatatgatgaggtcccacatttctgaatttattggtttgaggggaaaggctggttagacgtctttgtattgtcaatggttggtttttctctggcagtgtcagtgttagagctatcatcttccttcttaaatggcatgagcaatgagcaaacttccctcctttcaacattctcacctacatcatgtgccccttggctcacctactgagcttgccaacttctctcaaaaccaatgctgcattttgggagagcagctgtgaatgggcactgcctaaattgcctcttggggtaatctggagggtggaggtgttaactcaaacataaccctatgacttgactcagagatatccattgactttgaggattagtgtgtttgctcaggccagttgtacagccagtgtgcaagagatttggtacctttgcactaatgcacacaccagtgtctatttcattgggtttggaatccactggactctgttgacctaaacagttagggttttgattttttttgatatgcaaatttatattgagatcattttcatattcctgtcttttggtttgtctttactaaagcttggctggtggtgctgtgtccctagaattatccctgcaaccaactcccaagttacaagcttcattaagagccttagactcacttttttctagcatcttctgacctgagaaaattccactgggagtaaaggatagtatcttgtgtcatatgggtcttactctccctattttaccaatgagaaaacaaaactcagagaaagatgacttgctaatacatcaaacccatgtcctttttattgaactatgctgccatttaattaaccgcccttcccctctgagggagtaaggaaacagatcctgagttcacttgagcactttcaaaaaagcaagcagttgattgaatttggtgtcagagaggagcatactttgcaaatcaggaagagtgacagcttaccctgtcctggaacccttatcccacttccaggctgactttagttgataatgcacttctggctgtaaatgttgccaacacttcctggttttgcttaggtacagtgaaagggcatagtgagagctatttttagtgattctgttctttctgtcagcaacatgaaggagggacgtttgaataatttttgttgtagaatatttcttcatgaaaggcttttgggtgtctttaacaggtgttgggctagagccccaccaggagttgaactgcctcttgggggtcaggttccctaggagatctgtcacctcttcaggagtatttgagaacattgtgtagttacagcttcactaaatgcacgtgacaggcttctgtgccttgggagccctggcttatgctgaaacttctggctgaccagagcagtacagcaactttgccctgtctgtgttctgcttcctggatgcatccttcagccactaaccagcattgcaagatggagcagggtgaacaagctggagactgaatagtcttttggagtttgcgttttgattattgcaggcgtgttacaatatactggtgatttacctggtactgtggcacctcccagaaagtctggtttttgccccatgtttgatatttactaggcagaaattctttgtcctgttaactgcctcctgggagaaaaagaggcaatacagagttaaatccttaatttgcccactgagacagatgagctgtggtattccaaaagacaaattctatgactagtgtctcctgttcaatgtaagtgagaccctctttggccaatctgcttctagtcaaggctaaatggattggaataaccctagttggccaggctacacattgccagcatgtcccgttgagttttaattgcctcatgtggctgtggactttatgagtcaatcatttgtaggctccagtttgcacctagtttttttttttaaaaagtgcatttacacgcttttggtagtcctgttttatcaagaatccatggagggttttggtcagtacagctggtgcaggatcctcacggagaaacagtggagtttcacattgagttggtttgaaatggcaccccaggactttgggcctgccttacttgatagcctcgttcagtgagcaaagacttagtgagcagctcttgtatgccaagtattttgctaagctctggaaaaaagataaacaagacatggttcttgctttcaaggagtgtgtaattctttagccagatatggaaacctggaccctgagtgggagaaaggagacagatgaaaggagtccgtgattttgtaaccaagagctgcctgcatggttatgagtatcactgattttagggacgccccacagagctaaagcatttttttaatccgagaggacttttgtaactcatattagttaatcttctagctctgagatagcaacacagctcttagaattctgtaagtagcttgaggcctcctcctctactgtacatgttcttgctttcccaaaattgtaagtttggtttttcctatgaacaagactgtaattgatttttctctccctgaggaaaaaagttcggaataaatgagacatggatatgaaactacttagcacaatgcctggtacatattaggccctcagcaaatgtggctaccgtgtcattatttcatggtgagactcaaggcaaaacaagattcttaatttatgctccgtaaatgctagaggcttgggcaatacggtctgtcctgaaaaacaggactctgtgtctcattgcctctagaatccttaggtagcagtttctgttcactgtcttttcttttttaaaaatatctgctggacacaattacggccattacatgatgcaggtgattctacctattttttaaaaagaacaaaatttcttttatattgtgacagtacattttaataaaggaaaattattttcttccccctactccccctccttttttttttctggtaaagacagggtctcactctgttgccagactggtctcaaactcctggcctcaagtaacccttctgtctcagcctcccaaagtgctgggattacaggtgtgtgccacatgtccggccaggaaaattattttctatcttaaagaaacatagttacattttagaatgtcaattcagttaaatctttctcagtttttacctttagatggctcctggaaaggccagcgttccttttcccctctctgaattgaaagcacttgaccccatgctgcccctgcttccaggcctgtctcagttgtcatatattgtgagtccctggcaccattactgttttctaagccagtcttctaggtcttactttcaggatgctgcttcatggcatgaggatatagtttacagtgttgtagtttttttttttttaaagctttgttctttaaaaatactttttaaaaagaaatctactggttagatttattgtctcacaaaaatgtttttagagattatttttttcacaaatgttttctttctcatgctgatgatcaactgatttttgtctacaggtgttagcttctcacagtattttttcattttagagtctatttaccaaatgaccatttttagtgttaaaaggtactgaggaattgaggtatgtaaatcaggtgacataaacatgaaaattatgtgcctaaatatttttgtaatggtgtaaaataaatactttttcctg

SEQ ID NO: 111 - DNA, 3010 bp, Homo sapiens
agtgcctaatgggtgttgttcctggctggacttgatgtccagggcctgaggggttttctcgccgagtctcctggggcggtccggaggctcgtgccctgttgtggggcccccatttgccgccgccatgcccacggccgccgcccccatcatcagctcggtccagaagctggttctgtatgagactagagctagatactttctagttgggagcaataatgcagaaacgaaatatcgtgtcttgaagattgatagaacagaaccaaaagatttggtcataattgatgacaggcatgtctatactcaacaagaagtaagggaacttcttggccgcttggatcttggaaatagaacaaagatgggacagaaaggatcctcgggcttatttcgagcggtttcagcttttggtgttgtgggttttgtcaggttcttagaaggctattatattgtgttaataactaaaaggaggaagatggcggatattggaggtcatgcaatctataaggtcgaagatacaaatatgatctatatacccaatgattctgtacgggttactcatcctgatgaagctaggtatctacgaatatttcaaaatgtggacctatctagcaatttttactttagttacagctatgatttgtcccactcacttcaatataatctcactgtcttgcgaatgcccctggagatgttaaagtcagaaatgacccagaatcgccaagagagctttgacatctttgaagatgaaggattaattacacaaggtggaagcggggtatttgggatctgtagtgagccttatatgaaatatgtatggaatggtgaacttctggatataattaaaagtactgtgcatcgtgactggcttttgtatattattcatgggttctgtgggcagtcaaagctgttgatctatggacgaccagtgtatgtcactctaatagctagaagatccagtaaatttgctggcacccgttttcttaaaagaggtgcaaactgtgagggtgatgttgcaaatgaagtggagactgaacaaatactctgcgatgcttctgtgatgtctttcactgcaggaagttattcttcatatgtacaagttagaggatctgtgcccttatactggtctcaggacatttcaactatgatgcctaaaccacctattacattggatcaggcagatccatttgcacatgtggctgcccttcactttgaccagatgttccagaggtttggctctcccatcatcatcttgaatttagtgaaggaacgagagaaaagaaagcatgaaagaattctgagtgaagaacttgttgctgctgtgacctatctcaaccaatttttgcctcctgagcacactattgtttatattccctgggacatggccaagtataccaaaagcaagctgtgtaatgttcttgatcgactaaatgtgattgcagaaagtgtggtgaagaaaacaggtttctttgtaaaccgccctgattcttactgtagcattttgcggccagatgaaaagtggaatgaactaggaggatgtgtgattcccactggtcgcctgcagactggcatccttcgaaccaactgtgtggactgtttagatcgcaccaacacagcacagtttatggtgggaaaatgtgctctggcctatcagctgtattcactgggactgattgacaaacctaatctacagtttgatacagatgcagttaggttatttgaggaactctatgaagatcatggtgataccctatcccttcagtatggtggttctcaacttgttcatcgtgtgaaaacctacagaaagatagcaccatggacccagcactccaaagacatcatgcaaaccctgtctagatattacagcaatgctttttcagatgccgatagacaagattccattaatctcttcctgggagttttccatcccactgaagggaaacctcatctctgggagctcccaacagatttttatttgcatcacaaaaataccatgagacttttgccaacaagaagaagttatacttactggtggacaccagaggtgataaagcatttaccattgccctatgatgaagttatctgtgctgtgaacttaaagaagttgatagtgaagaaattccacaaatatgaagaagagattgatatccacaatgagttctttcggccatatgagttgagcagctttgatgataccttttgcttggctatgacaagctcagcacgtgactttatgcctaagaccgttggaattgatccaagtccatttactgtgcgtaaaccagatgaaactggaaaatcagtattgggaaacaaaagcaatagagaagaagctgtattacagcggaaaacggcagccagcgccccgccgccccccagcgaggaggctgtgtccagcagctctgaggatgactctgggactgatcgggaagaagagggctctgtgtctcagcgctccactcccgtgaagatgactgatgcaggagacagtgccaaagtgaccgagaatgtggtccaacccatgaaggagctatatggaattaacctctcagatggcctctcagaagaagatttctccatttattcaagatttgttcagctggggcagagtcaacataaacaagacaagaatagccagcagccctgttctaggtgctcagatggagttataaaactaacacccatctcagctttctcgcaagataacatctatgaagttcagcccccaagagtagacagaaaatctacagagatcttccaagcccacatccaggccagccaaggtatcatgcagcccctaggaaaagaggactcctccatgtaccgagagtacatcaggaaccgctacctgtgaaaagagcgcaggtccacctggtggacacgtctgattagcttagaacctgtcttgtctcatcttcaaaaggtaacttattaaaagtcctttgcgtctgaagcctttctccttttctgtcatttgcaaattccaaattatagctaataaagatgactagataac

SEQ ID NO: 112 - DNA, 5975 bp, Homo sapiens
gaaaagttgaacaagattcaaaggagacagtaaaattatcccatgaagatgaccatattcttgaggacgctggatcttctgatatttctagtgatgctgcttgtacaaatccaaataagacagaaaacagccttgtaggtttgcctagttgtgtagatgaagtgactgaatgtaatttggaattgaaggataccatgggtattgctgataaaactgagaacacccttgaaagaaataaaattgaaccgttgggttattgtgaagatgcggagtctaataggcagttggagagcactgagtttaataaatcaaacttagaggtggttgatactagtacttttggaccggaaagtaatatcttggaaaatgctatttgtgatgtgcctgaccaaaattcaaaacagttgaatgctatagaaagtactaaaatagagtcccatgaaacagcaaaccttcaggatgacagaaacagccagtcaagtagcgtttcttacttagagtcaaaaagtgtaaaatccaaacatacaaaacctgtaattcattctaagcaaaacatgaccacagatgctccgaagaaaattgttgcagcaaagtatgaagtaatacatagcaaaactaaagttaatgtcaaaagtgtgaaacgaaatactgatgtaccagaatctcagcaaaattttcataggccagtcaaagtcagaaaaaaacaaattgataaggagccaaagattcagagttgcaattctggggttaaatctgtgaaaaaccaagctcattctgtactgaaaaaaacattacaggatcaaactttagtacaaattttcaagcccttaactcattctttgagtgataagtcacacgctcatcctggttgcttgaaagaacctcatcatcctgcacaaactggacatgtatcacattctagccagaaacagtgtcataagcctcagcaacaggccccagcaatgaaaaccaatagtcacgtgaaggaagagcttgaacacccaggcgttgagcattttaaggaagaggataaactgaaactgaaaaaacctgagaagaacctacaaccccgccaaagaagaagcagcaaaagtttttctttagatgagccaccattgttcattccagataacatagctaccataagaagagaaggctctgatcatagctcctcatttgaaagcaaatatatgtggactcccagcaagcagtgtgggttttgcaaaaaaccacatggcaacaggtttatggttggctgtgggagatgtgatgactggtttcatggtgattgtgttgggttaagtctttctcaagcacagcagatgggcgaggaagacaaagaatatgtctgtgtaaaatgttgtgctgaagaagacaaaaagactgaaatactagatccagatactttggaaaaccaagctacagttgaattccatagtggagataaaacaatggagtgtgaaaagcttggattatcaaaacacacaacaaatgatagaaccaaatatatagatgatacagtgaagcacaaggtcaaaattttaaaacgggagtctggtgaaggcagaaattcatcagactgtagagataatgaaattaaaaaatggcagctagctcctcttcgtaagatgggacaaccagttttacctcggagatcctcagaagaaaaaagtgaaaaaataccgaaagagtctacaactgttacttgcacaggagaaaaagcttcaaaaccaggtactcatgagaagcaagagatgaaaaagaagaaagttgaaaaaggagtgcttaatgtacatcctgctgcttctgcttccaagccttctgcagatcagatcaggcaaagtgtcagacattctctcaaagacattcttatgaagagacttacagactcaaatttgaaggtaccagaggaaaaggcagcaaaagttgccacaaaaattgagaaagagcttttctctttttttcgggacacagatgctaaatataagaacaaatatagaagtttgatgtttaatttgaaagatcctaaaaacaatatattatttaaaaaagtactgaaaggagaagtaactcctgatcatcttatcagaatgagtccagaagaactagcttctaaagagttagctgcttggagacgaagagaaaacagacataccatagaaatgattgagaaagagcagagagaagtggaacgacggccaatcaccaaaataactcataaaggtgaaatagaaattgagagtgatgccccaatgaaagaacaggaagcagccatggagattcaggaaccagccgccaataagtcattggagaagccagaaggatctgaaaaacaaaaagaggaggttgactctatgtctaaagataccactagtcaacacagacagcatctttttgatctcaactgcaaaatctgcataggtcgaatggcaccacctgtagatgatctttctccaaaaaaagtaaaagttgttgtaggagtagctcgcaaacattcagacaatgaagcagaaagtatagcagatgcattatcttcaacctcaaatattttggcttctgaattctttgaggaggagaaacaggagtctccaaagtcaacgttctctcctgctccacgtccagagatgcctggaactgttgaagttgagtctacctttctggctcgattgaacttcatctggaaaggttttatcaacatgccttctgtggcaaaatttgttaccaaagcctatccagtatctggctccccagaatacctgacagaggacctaccagatagtattcaagtaggtggcaggatatcacctcagacagtttgggattatgtggaaaaaataaaagcatcaggaaccaaggaaatttgtgtggttcgcttcacaccagtaactgaagaagatcaaatttcttatactttgctctttgcatacttcagtagcagaaagcgctatggagtagctgctaacaacatgaagcaggttaaagatatgtaccttattcctttgggtgccacagataaaattccacaccctcttgtgccttttgatggacctgggcttgaactgcatagacctaatctattgttgggcttaattattcgtcagaaactgaagcgacagcacagtgcctgtgctagtactagtcatatagctgagactcctgaaagtgcaccaccaatagcattgccacctgataaaaaaagtaaaatagaagtttctacagaagaagcaccagaggaagaaaatgacttttttaattcttttacaactgtattacacaagcagagaaataaacctcagcagaatcttcaggaagaccttccaacagcagttgaacctttaatggaagtcaccaaacaggagccaccaaaacctttaagatttcttcctggcgtgttgattggctgggagaatcaacctactactctggaattagcaaataaacctcttcctgtggatgatatacttcaaagccttttgggcaccactggtcaagtatatgaccaggcccagtcagtgatggaacaaaacactgttaaagaaattccatttttaaatgagcagaccaactcaaaaatagagaaaacagataatgtggaagtaactgatggtgaaaacaaggagataaaagttaaagtagataatatttcagaatctacagataagtcagcagaaatagaaacatcagtagtagggtcctcttccatttctgcagggtctttgacgagtcttagtctcagaggtaagccaccagatgtttctacagaagcatttttaacaaatttatcaattcagtcaaaacaagaggaaactgtggagagtaaagagaaaacattaaaaagacagcttcaggaagatcaagagaataatttgcaagataaccagacttcaaatagttctccatgcagatctaatgtaggaaaaggaaacatagatggtaatgtgagctgtagtgaaaaccttgttgctaatacagcgaggtctccacagtttatcaacctgaaaagggatcctaggcaagcagcaggacgaagtcagcctgtaactacttcagaaagcaaagatggagatagttgccggaatggagaaaaacacatgctgcctggcctgtcacacaacaaggagcacttaacagaacaaatcaatgtagaggaaaagttgtgttctgcagagaaaaactcgtgtgttcagcagagtgacaatttaaaagttgcacaaaactcaccatcagtagaaaacatacagacttctcaagcagaacaagcaaaacccttacaggaggatattttaatgcaaaatattgaaactgtgcacccatttcgaagaggatcagcagtagcgacatctcattttgaagttggaaacacatgtccatcagaatttccttctaaaagcatcacctttacttccagaagcaccagccccagaacaagtacaaacttttcacccatgaggccacagcagcccaaccttcagcatctcaagtctagcccacctggatttccatttccagggcctcctaattttcccccacaaagcatgtttggatttccaccacatttgccacctccattacttccccctccaggctttggctttgctcaaaatcccatggttccctggccacctgttgttcatctcccaggtcagccacagcgtatgatgggtcctctctcacaagcatcaaggtatataggcccgcagaatttttaccaggttaaagacattcggaggccagaaaggcgccatagtgacccttggggtaggcaagaccaacagcaactggataggccatttaataggggtaaaggggaccgccagagattttatagtgattcacaccatttgaaaagagagcgacatgaaaaggaatgggagcaagaatctgaaaggcatagacgcagagacagaagccaagacaaggacagagacagaaaaagcagggaggaagggcacaaagataaagagagggcacggttatcacatggtgatcgaggaacagatggaaaagcaagcagagatagtaggaatgtagacaagaagccagataaacctaaaagtgaagactatgagaaggacaaagaacgagagaaaagtaaacacagagaaggagaaaaggacagggataggtaccacaaagatagggaccacactgacagaactaaaagcaaaaggtaaaatttgcaggctgcttcaggattacatttaaataactgttaaaatgttgtatcttgtaaacaaaagaaagattgcctgctaggattgtgccatctttaaaatttttactattggtcatttgcagaacagtaaattctgtgtgttggtacagagtgctctgtaccagtgctcatcatcccttcttcataccaacggtccctagttataggaatttaatatttttaaaagttttacattgctgtatattcaaagatttgttttattaatatgcaataaaggcttagaaattttagttttattccttaattggtaaatatggttaactatggaatatatttacttcctctagtgaatgtcctttatataatgactaatttgggagtaatgtgtgctctgtaagtttgttttaaattgcactgtttttaaagaaactgtagaggagcaacaaaaatccaagcaacttcataatcagattatgctaatcatttagttgagcagtttttgaccaagaatcagaagcccaaggggtacatttattgctttaatctgcactcattgaagtcatttattaccatatactacagctttgtggtaggccattattttcattttcatttttggctcttcagaaacttgaatacttaagcttgtacatgatcttgtgttttgctatcctttttactgtaaaatgtaaatattttaagggatattttgattctaaatatgataaaataatttctcacctattttgtgtgtgtgacttgaaattcagtagtaaaagaatttcttctttaaagcttt

SEQ ID NO: 113 - DNA, 4408 bp, Homo sapiens
cgcggctggcggcgggcacccctccgccgtggcgtcggcagcagtccccgagcccgcaggctcatgcggcccctttggttgctcctcgcagtgggcgtctttgactgggcaggggcttcggacggcggcggcggagaggctagagccatggacgaggagatcgtgtccgagaagcaagccgaggagagccaccggcaggacagcgccaacctgctcatcttcatcctgctgctcaccctcaccattctcacaatctggctcttcaagcaccgccgggcccgcttcctgcacgaaaccggcctggctatgatttatggtcttttggtgggccttgtgcttcggtatggcattcatgttccgagtgatgtaaataatgtgaccctgagctgtgaagtgcagtcaagtccaactaccttactggttacttttgatccagaagtatttttcaacatattacttcctcctatcatattttatgcaggttatagcctgaaaaggagacatttttttcgaaatcttgggtctatcctagcatacgcttttcttggaacagcaatttcttgtttcgttattgggtcaataatgtatggctgtgtaacgctgatgaaggtaacgggacaacttgcaggagatttttactttacagattgcctactgtttggtgccattgtatcagcaactgatccagtgactgttcttgctatattccacgagcttcaagttgatgttgaactctatgcacttctttttggtgaaagtgtcctcaatgatgctgttgccatagtgctgtcctcctcaatagtggcataccagccagctggagacaacagtcacacctttgatgtcacagcgatgttcaagtctattgggatcttccttggaatcttcagtggatcttttgcaatgggtgctgctactggagtggtgacagctttagtgacaaagttcaccaaattacgggagttccagttgttggagacaggcctgttcttcttgatgtcctggagtaccttcctcttggctgaagcatggggcttcacaggtgtagttgcagtattgttttgtggcatcacacaagcacattatacgtataataatttgtccacggagtctcagcatagaactaaacagttgtttgagcttctcaatttcttggcagagaatttcatcttctcctacatggggctgacactgttcaccttccagaaccatgtctttaacccaacatttgtagtaggagcatttgttgctattttcttgggaagagctgccaatatttaccccttgtccctcttacttaatttgggtagaagaagtaagattggatcaaattttcaacacatgatgatgtttgctggccttcgtggtgcaatggcatttgccttggccattcgagatactgccacttatgcacggcaaatgatgttcagcaccacgcttctgattgtgttttttaccgtgtgggtatttggtggtggcaccactgcaatgctgtcatgcttgcatatcagggttggtgttgattcagaccaagaacacttgggtgttcctgaaaatgaaaggagaactaccaaagcagagagtgcttggcttttccggatgtggtacaactttgatcataactatctgaagcctctgctgacccacagcgggcctccgctgacaacaacactccctgcctgctgtggacccatcgccaggtgcctcaccagcccccaggcttacgaaaaccaggaacagttgaaagatgatgattctgatcttattctcaatgatggtgacatcagtttgacatatggagattctactgtgaacactgaaccggccacatccagcgccccaaggagatttatgggaaacagttctgaagatgccttggatcgggagcttgcatttggggaccatgaactggtcattcgaggaacacgcctggttcttccaatggatgattctgaacccccgctaaatttgttagataatacgagacatggtccagcctaagcttactaatactcacttagtgatttgtaaaatttgcacatgtgattgtgaagaaatttgtactacctaaaagtcccagtgcatgtctctgaatgtgtaagctatataaatgctatttatatggcatagaaagaatataaatatcctgtacacggcagattgtgaacaaactatattcctttaagttttcctggttgcactctgtagactggatctgttttaggaagttactttcacagtgatgttgtgtgttctgttagttttatgtctcagttaaagtgtaaaaagtgacggattttctctttcttaaacttacctgacacttaaccagagtaccagttctcgtgatgtgaattaatttttttgtgtgctaggggagggagagtgaggagggagtgttatttccttgggaacctagggaggagaggttcctttgttgggaaacttttgttgatagctgctgcctttgtcctgatcgttttctttcccttttctctggtggcctgttgtggtgcaacgagctgatggcatttgatcttgccccattcaggttggggagtgaagtgtggggacccttttcccccgcttgctgtgaaagcacagattcattgactacagtacactgttgttcagaaaagaaggctgcaaatgacttctgagactttatgtcttttcttccagaccaagaccgtagaaggagtcacatctagccggcttagccaaagtacaggtgtatatagttcagggcacttgatttagatttggaggggctggggtgggcagagagcaagaggcgagtaaagagaatggtggtttcagagatctctcttcccaaatgtgtaaatattctataccagataagtttaaataagaaatttaattgctgcttaatttttgattatgtactttatctgtatagcaggctttgtcgtcagaagtttttatatcgatttaaattgctgctctttagcagccaaacaggagcaaaatgtaaaatttttgaacttactgtgtctaatcatcatttgttagtctgtagttaatgtcaacagttaatttatgaacccacgatcgttccacactgcaccaaagtcagtcataagagaaatcgaatattctggagcactgattgcagcagggtggctcctttgtgtgcagcaggtgtagtagtcttcattttcatggtacgttttaatattaattacctaagctgccatgcattttttttttacagttctcaaggaagagcacagaacaatttctcatttcatatttggagtatgaaagtagattctattttgtaatgctgataatacctaaagatgcattgaatgcttggaagaatgctttttgatgttgattttgacctgttcatgattcagaagaaaaacaaacttttttggattttttttccctcaggtctgagtagcattgccttaaatcttatccagttagaacattgatttatttacatgatgttcagattttccagtgaaaaatacccttctgaacaaaacatgtacttactctccgaaaggcatctatctgtgctattgcaaacactccttgagattttaggggaattctaatgttgtaccctttcgtggcagctttgactgttggcatagccatttgttatgtagtggtagcgactttcctgctatgcaggaatccctcccatgacgtgtatgttttacatgatgtgtgcctcttcacgcagtaaatagtttcttgttaatgtatgtttgaggagtttgaacgtcagtgtcacttacccacaaagttattcaagttgtaaaaggttataaataatttaacaactaccttttttattctgtcgggttactgacctcactttatgtaaatacttcgcatgacaaattcagtaactcgtctatttcagcatgcataagacttttcactagggaaactgataaagcttgagtcaactaaatctgccttcatactttatcaaggggaaccaagcctgctgtgcttacatcagcatctggaagactttcctctcctctaatctgtgtacacatctccaagcaaggaagaaaaaacaaactctgctcagacgcctatgaaacacctgaatgaactttgatgaagtacagtctgagttaccatcatgcacaagtagaactgctcttggacttgttttcctgttgtttgtggaacctacgcgtttgaatggcttgaacgttgcatcttttaaagttattttttaaggtttcttggcatttatcctagttgtccgtgtttggcaatgtgctgttaaagtaatagacttttaatctttatgtattttttgttttctctggagtacttggacagatgttatagtggtttcttttaggaaaatctgtcattaaaaaagttatagccttgcaaataaccactc

SEQ ID NO: 114 - DNA, 3188 bp, Homo sapiens
  misc_feature (1)...(3188): n=a,t,g or c
attcgcggccgctgcaagaaccagcgcaagagggaagcggagttatagctaccccggccgcggagccggctcactgcactacccccgcccccttctttcctccagacgccgaagtcgcgggcgctcatggcgggcctggaggtactgttcgcatcggcagcgccggccatcacctgcaggcaggacgcgctcgtctgcttcttgcattgggaagtggtgacacacggttactgcggcttgggtgtcggtgaccagccgggtcccaatgataagaagtcagaactgctgccagctgggtggaacaacaataaagacctgtatgtcctccggtatgagtataaggatgggtccagaaagctccttgtgaaagccatcaccgtggagagcagcatgatcctcaatgtgctggaatatggctcacagcaagtggcagacttgaccctgaacttggatgattatattgatgcagaacacctgggtgacttccacaggacctacaagaacagtgaggagcttcggtctcgtattgtgtctggaatcatcacacctatccatgagcagtgggaaaaggctaatgtaagcagtccccaccgggagttcccccctgctaccgccagagaggtggacccactccggattcctccacaccacccacacaccagtcggcagcctccctggtgtgatcccctgggcccgtttgttgtcgggggagaagacttagacccttttgggcctcggagaggtggcatgattgtggatcccctgagatctggcttcccaagagcacttattgacccttcctcaggcctcccgaaccgacttcctccaggcgctgtgcccccaggagctcgctttgacccctttggacccattgggaccagcccacccggacctaacccagaccatctccccccgccgggctacgatgacatgtacctgtgaaggcctcaagaatgtaacatcccaggcttccctccattctcctggagctgccaccgctgtccccatcagcaaccatgttcttgcaggctgggggcaagggattctgctcatgtgtgtggagaccggctgggatagcctccccaccccttatcagagncaagacacctgctggagctctccacctagctggagatagctcccaaagagaaatcagtgtgtctcttncaccatcagctcctccccttacaccaccagctcctctccacttcccangggagactccggcanccttcagcaacatatatcctcgaccagatgcagtgctataagaacagaacgcattttggatgttattattaagaaccaaatgtcaatacagaattcatgttgccggtttcccacttttctttttacattaatgcatagctgcttccatttatgagactttagagtttgagtttctgtagggctgaatgactctttttcctgcccagggcccattcttgcttctcaggcaccttccgtttattaattgccattgctcctgacatcactaagatgggtccccttctggctgcatgaatggaaatgagtgactggaaatcccataggccacaagaatgactttcacaagggcaggaacattgtggaaagactgcatcattctgatgaggcaaaatcctccagctattcctgtctgggccagttttgtaggtccatctgtgcatgggcagcagtagtcacaaagccaagganaaaacagagcagacctgaaggctaatcttatttttgccactaacttagtgantgaccctaagcaagttccttctcctcttagggccttgtgccaagcctatgaaattggaggtgnctttcctgctctaaagcattttgatgtctcattctgtgtttggtaacccctataaactggggcagaggaaaagaatgatggttcaaggccatacttcccttgaaccttgtgtggttcttgcctaactctgtggtttttggaccccatggggcccagacagagcacaggagcatgggctgcctctgagtgtggtgttgaacttcgggaggagcagggagccctgcaccttgtgtcctggcccacctgacctttggtgttctccggatccttttcagcccgaggcctgacagacgcgggcagtgatgagccctgttctggagtggaaagagcacgatagagcaccaggctaagaggcacgagatcaaggcggtagtcacttccgctctgcagctagcatttcaaccatatgtggatcctttcatttctcagctccctggattccttcccctaaattaggacctattatttacctgtaggtaagcaagctactgtagctcttctgaggtatctcccaggctgttttctgtagcctcagantgcctatctncttagcctgagaacaggtagatgnaaactaaactgatgcctaggcccagggtcagtctcagatggaagctgggcctgggtggggaggctagcatgcgtggctccctgggtatttctgtcagtccccatggcaagcagtgatttagtaaaacaccccagagtcagggaagccaaccaccttgaaacctttaggacatctctgctttggagaaagacccagagatcaggcagaggtgcagattcantcattactcataacctttgagagatgtcacntgggnggagtgttagtctttgttttggagntgggccattcttgcaccccccaggacttagagcagtttgntcataaagacatcctttattataaaaggaagtatttataggatgatagagaccatcagatagaagcagggggggtagataacttttaggnccttgatgtgtggagaagataaaatttaaacaataaatttgccacttagattttctancaccacagtccgacgaaagatagttatatacaacattctgttttctgataacaactgtgattcaccttcagaattggccattttttttgtgagtttccttgcatcaaggacactgagaaacacagtcattgtcttaggtgttctatgggaggaagtgaatagagcctttaggaacttcctggtcaagcttatggtgcttattttgatctgggccacttccctccttccagtcatgagtaatcatcaaggagcaagttggagtgtttcaggtgtatattttgtagaacccaaaagattggagccttaacaataaacatcagagcggccgcgaattc

SEQ ID NO: 115 - DNA, 297 bp, Homo sapiens
  misc_feature (1)...(297): n=a,t,g or c
cagctgttcaatatgtttaattttaggtggggctataggagggaggaaagaagggagtgacaggttttctcatttttcaaattattctttggcaaagaacaagttaaacattttactaagactgtatatcaacattttactagacttattttatgaagaatagtgaacgtgtagcaaacttgantttccaaagcgaaacatatggataaaagtgaaggccgggtgcggtggctcacacctgtaatcccagcactttgggatgtcaaggcgggcagactgtttgagctctggagtttg

SEQ ID NO: 116 - DNA, 232 bp, Homo sapiens
gaagcagtattgattctttattgggagtacatttttttaggtctcttaaactttaatttcacacagtaaattttgaatctcataaggaagcatatttgaacctagtcaatttaatcttagtgttcccttgaaaactttttttccctacaaaattttaagtgaaaaatacaatagtaaattaagattacactggggaaaaaaatgcaggtatcactttactccattgttatct

SEQ ID NO: 117 - DNA, 338 bp, Homo sapiens
  misc_feature (1)...(338): n=a,t,g or c
ctataacatcatgctacctagaagaaaaagaaatgaaggtaagcagtcagccaggaaagtcaggaaaaatgatatgctacttgtaaagagctcccctatattgtatcattctgaaatgtccaattttcaaagagtcagagtagtacagaaatgttcaatgttaaatcactactcaacataagcaatctgactttgatggttcacaagctcttccagatcttgtngtgccttaaagttctcactaacaatatcaattatcagtgcactacagatatataggaaaagaaaatcccaggtaacagaaaagccagatcacctgcctccaagatgccgggcac

SEQ ID NO: 118 - DNA, 314 bp, Homo sapiens
  misc_feature (1)...(314): n=a,t,g or c
gccaagcaatcaagcaaaacacaagaccaataganttagtagacagaagccttggggacaatggcagtgcccttnctgagtaagacatgaatgccatctggaggntccatttgaaactacagtgcagtaaccaaagaacctaatgttttcaagcataaaggtactttttgtgaacaggtgggcaacacaggcaggattaactaccttcattctatggacttaaattcctatttctttctagcttccagtagaagactcttgagaatattgttgttgagtgaagtactttccgctgaaatgggaaatgaacccct

SEQ ID NO: 119 - DNA, 389 bp, Homo sapiens
  misc_feature (1)...(389): n=a,t,g or c
tttattattataaatgaaaataccagagttttaaaacggcacttaatcatgtcanannntcagagtcntccaaataaancagattctngaaaanaatnaaacttganacaanggaggcaaaattaacccttgtcagggaaggcattgccataaacgaaaggacccataactgcattaagcagagagggactgactgtcaatgaagcttctctatttgcaatttattcagcaaaagcgaacaatttttaaaaagtctctaatgcaaaatttagttcaagtatcaaaggtctgatcaattttaaaaggcattagttttatttttaataaattgaactggccttagatgaaagatatagttctgttcnctattttatancttatttaccgag

SEQ ID NO: 120 - DNA, 436 bp, Homo sapiens
  misc_feature (1)...(436): n=a,t,g or c
tatgaaagaaaatgtaaacattttatttggcagttgtttctgtacacatgaataaataaatggaaaagtacatattaatatttctttttggagtaacagataccattaaacgcttatttacacatcttcactgcaaagaacagttacacaattaaattttgtcttataaaaggtaacttcccacatcactggnactggnacagttaaggatggagatactggtagtgcttggttctagcagtctcaatgtttgaaaggcattcatttgcaagtgtgataagaagagtcatcatgcattgagttncatccgggtcatgtactgtaggaaaatttctggatgggcagccacagaatttgggtgtctcatggcggcttaaggtccaactatggacatgtttggtaaatcngtgtntttcccttaaaaccggaggncaaa

SEQ ID NO: 121 - DNA, 206 bp, Homo sapiens
tcttctgtaatatgtgtcaaagatattatgaaaaaaagattagaagtcctttcccccatttttagtaatcttgatattatgaaacaagtgagtactaaaacaaaaacaacaataaatatgagcactacagcaaacatgacatactgtaatagaattttattgaaaaaaataacacgtacttactgaagtttttttttttttttttt

SEQ ID NO: 122 - DNA, 416 bp, Homo sapiens
  misc_feature (1)...(416): n=a,t,g or c
acacccagactcagtgacttttatttttcatttccctaaaagtttcccaaatatganttaaattgtcaaggataagaaatggattagccagatagtaacctacctagcgatttctctttcaaaacctttgagcaacctaccagtattattttcaaagcctctaattctacataatttatgcctgataaatttaatttagaagtccaaagtatcacgaagtcattcaactttttttttaagtctcacatgacggcgcagagccctgggcatggggggggaagctgcctgcagagntcgcgggctgtgccccgtgcattccaccggaggccacggagggctttcttcattcctgccttccttcggtcacctctctnttttaaggnaaaagggntaaggttaaatatcacattaccnaa

SEQ ID NO: 123 - DNA, 346 bp, Homo sapiens
catctttaatgcagaggaggagatgggatgtcactcgctgtctggaggcacgtgggtggtgtgcgggccctcactggccagcctctgggtggccccgcctatcccagtatgaacgtagccaactcaagccctctactgtgtctcctcgaggctgatactcacagcccacgaagcctttgtagccttcatcttccagcagttgaaacagataggggaaattcagctctccggggctgctgggctcccctcggcctgggacctgtgccacctgcacatgcccaacaatgggcaggaactcccggatgtttcctgtcaggttcccatccatgatctgccagtgggaata

SEQ ID NO: 124 - DNA, 394 bp, Homo sapiens
  misc_feature (1)...(394): n=a,t,g or c
atncaaattaaaaacatgaaaattacaccaaaaagatggaactacttttgtagcacaactcagaacttctgttcgtaacaccggactagagaagaggtcgcttttggctgaatctaatgaccttagaagggaaaggccattgctgggcaggatctggtggcaacgcacacggaagtcctagaactctatgaagcctacctcaggccctgcgggtgcgtctggagttccaaggcatttgggggaaccaaagcaatttcagctaacagtgaccagtttttaggaatgggagcttatgatcagagggaccataaaccctcatccaccctaggagctcaatgccaggaaaaataaaaaataattncaaaaaataaaggggaaatagctttttgtgcta

SEQ ID NO: 125 - DNA, 411 bp, Homo sapiens
  misc_feature (1)...(411): n=a,t,g or c
tgggtcaaagggggctctgcaggtcgatgatctcctcaaacctgcaaagacatcccatctatgcaactggattggggggtgtcattccaaacaccctcagatcctgcccagatattcatctgtgaacaaggtatttcaacactaattttgaaacaattctacatctagcaggtcagtttatcattttccagaatctgaactactgtcaggatagactcaagtgagattaacacagggttaatcttcaatcttaacacaattatcaattagttctcccagtggaacgattaaggcttttgtcaacatgtaggcatttctgctgtnaacctataagtctncatattaccagttccccgggataggataggntattatgtcaggtcccaaggatagggagtttatgttttccat

SEQ ID NO: 126 - DNA, 387 bp, Homo sapiens
  misc_feature (1)...(387): n=a,t,g or c
tttatttgttctataatttaatagtatacctataaaataattacattatacttatagctttncttcatttataaacaaaacaaaaaaattaaatacaatttgagccattataaggtaaactttgtacatacgataaccccaganggagcttcacactgcaggcatatcatattgctttcattgctacacccacaattgggttcgaagagagtgtgctcgtgtttgcattctgtaagtncttnggcttaatccctcccctatctgtgtggggttccatgttaataaaatgatagggggttgggctttgcaggctgggtcagggggcttctcctccacttcacctcccaatccacccctaggcctccatttacaatcacgnaaatttcc

SEQ ID NO: 127 - DNA, 429 bp, Homo sapiens
cactaatacatacccctaaaagtcctatattgctactttctggatctcagtgaaatttatttccatactgactttctccagtccacagtgtatatgaatatgtacacatacagtgtttattagttgtcagtaaaaattctcatgaaactaaattccccatttatttaaaaggttagaaatgtttagtttgatgctggaaataaaatcattgaagtctatgtacagtaaatactttgaagtatatttttatggaaatcatcttttgggagacaaatgaaagatgtgcattttcctatatgaaataaaagaagtgctcaaggcaccccccaacactgacatggaggcgggtcttggagaccttgtaactggcctcccccacagctcaccccagagctaccataaatcatgtaatactatttatgcctctgg

SEQ ID NO: 128 - DNA, 439 bp, Homo sapiens
atttttgtagttttgggcaaaacattcactgttctgtttcagcatatttccttggaacatcttcatctctttccattttgcggacactccccttcttctattctcctttactcaaaacatatggtttagacccacatcatggctttcttgtgggaagcctggatgggactaggaaaacacatgtttccaacatggtgcatatctgtttgtgcagatatcagacaagatttaatcttgtctaacttatgcgtattgttttgatgtttgcctgtggttattctgggcacagcaatggtggacattattgaaaatgaactttattggcagatgaaagataatagaacatgaagatttatgaactaccataagctctgcatctctgggtcttcatttccaaagcagcacttggaaaaccaagcccagtttcaggcaaagagtt

SEQ ID NO: 129 - DNA, 363 bp, Homo sapiens
gagtgttaaaataattacacttaatattttaatagtgtgctgtgaaatacatagttttttgttttgttttggcaaatgtttcattttgttttaatgacttcggtccaatataaagaaaatgaaatacagtgaatagttcttctttcaagatgagctgtatttattactggaacggaagttgtcatatccgtgatcattagctttgaactttaagcacgactgcttttcctccaaggactgtttttcttcaaatgactggcaccagcagcataaagcatgacttaaagcagtttttgaaacttttgcccacccaatacagagcaattggggttaatgccgggaattccagtgaaagccaggttg

SEQ ID NO: 130 - DNA, 809 bp, Homo sapiens
atgcctgtcttcatcttgaaagaaaagctccaggtcccttctccagccacccagccccaagatggtgatgctgctgctgctgctttccgcactggctggcctcttcggtgcggcagagggacaagcatttcatcttgggaagtgccccaatcctccggtgcaggagaattttgacgtgaataagtatctcggaagatggtacgaaattgagaagatcccaacaacctttgagaatggacgctgcatccaggccaactactcactaatggaaaacggaaagatcaaagtgttaaaccaggagttgagagctgatggaactgtgaatcaaatcgaaggtgaagccaccccagttaacctcacagagcctgccaagctggaagttaagttttcctggtttatgccatcggcaccgtactggatcctggccaccgactatgagaactatgccctcgtgtattcctgtacctgcatcatccaactttttcacgtggattttgcttggatcttggcaagaaaccctaatctccctccagaaacagtggactctctaaaaaatatcctgacttctaataacattgatgtcaagaaaatgacggtcacagaccaggtgaactgccccaagctctcgtaaccaggttctacagggaggctgcacccactccatgttacttctgcttcgctttcccctaccccacccccccccataaagacaaaccaatcaaccacgacaaaggaagttgacctaaacatgtaaccatgccctaccctgttaccttgctagctgcaaaataaacttgttgctgacctgc

SEQ ID NO: 131 - DNA, 3175 bp, Homo sapiens
ggttcctggtcatacaccagtactaccaaggacagcttttttcctgcaagatctgttacctaaagcaataaaaaatggccagaggatcagtgtccgatgaggaaatgatggagctcagagaagcttttgccaaagttgatactgatggcaatggatacatcagcttcaatgagttgaatgacttgttcaaggctgcttgcttgcctttgcctgggtatagagtacgagaaattacagaaaacctgatggctacaggtgatctggaccaagatggaaggatcagctttgatgagtttatcaagattttccatggcctaaaaagcacagatgttgccaagacctttagaaaagcaatcaataagaaggaagggatttgtgcaatcggtggtacttcagagcagtctagcgttggcacccaacactcctattcagaggaagaaaagtatgcctttgtcaactggataaacaaagccctggaaaatgatcctgattgtcggcatgtcatcccaatgaacccaaacacgaatgatctctttaatgctgttggagatggcattgtcctttgtaaaatgatcaacctgtcagtgccagacacaattgatgaaagaacaatcaacaaaaagaagctaacccctttcaccattcaggaaaatctgaacttggctctgaactctgcctcagccatcgggtgccatgtggtcaacataggggctgaggacctgaaggaggggaagccttatctggtcctgggacttctgtggcaagtcatcaagattgggttgtttgctgacattgaactcagcagaaatgaagctctgattgctcttttgagagaaggtgagagcctggaggatttgatgaaactctcccctgaagagctcttgctgaggtgggctaattaccacctggaaaatgcaggctgcaacaaaattggcaacttcagtactgacatcaaggactcaaaagcttattaccacctgcttgagcaggtggctccaaaaggagatgaagaaggtgttcctgctgttgttattgacatgtcaggactgcgggagaaggatgacatccagagggcagaatgcatgctgcagcaggcggagaggctgggctgccggcagtttgtcacagccacagatgttgtccgagggaaccccaagttgaacttggcttttattgccaacctctttaacagataccctgccctgcacaaaccagagaaccaggacattgactggggggctcttgaaggtgagacgagagaagagcggacatttaggaactggatgaactccctgggtgttaaccctcgagtcaatcatttgtacagtgacttatcagatgccctggtcatcttccagctctatgaaaagatcaaagttcctgttgactggaacagagtaaacaaaccgccataccccaaactgggaggcaatatgaagaagcttgagaattgtaactacgcggtagaattggggaagaatcaagcgaagttctccctggttggcatcggtggacaagatctcaatgaaggaaaccgcactctcacactggccttgatttggcagctaatgagaaggtatacactgaatatcctcgaagaaattggtggtggccagaaggtcaatgatgacattattgtcaactgggtgaatgaaacattgagggaagcagagaaaagttcatccatctctagtttcaaggacccgaagattagtacaagtctgcctgttctggacctcatcgatgccatccaaccaggttccattaactatgaccttctgaagacagaaaatctgaatgatgatgagaaactcaacaatgcaaaatatgccatctctatggcccgaaaaattggagcaagagtgtatgccctgccagaagacctggttgaagtgaaccccaaaatggtcatgaccgtgtttgcctgcctcatggggaaaggaatgaagagggtgtgaggccaatggggctgggtgggaggcggtgcactcactcctgactgcccggcacagatgctccagggatgattcaagccattccaaagttcaacttggtgacactctataagattccaaaaagcacatattagtgcagccaagtagcctctcctgtatttaacaaaaagtgcttcattctttgcaggaggcccaacctcctatatataggtttctattcttgatttatttgcttcttcgaaaatctagaggaaaagaaagaagttattttccaggtacccttctcgcttttgccattagccaaggatagaagctgcagtggtattaattttgatataatctttcaaaccagcttgttgtggcttcccttttctttgttcaagatgagggccaggaggggaaacatcacacctgccctaaaccctgttcctggaggtcagcatttgatctgttgcaagcccctctttctgtcccctcttcctaccctgcctcccatgactttgctcctcacacttttggaaccatgccttccgggggggcccatctcttctggcggtccttgtctctgggccacttggagtgtgtgataaatcagtcaagctgttgaagtctcaggagtctctggtagcctgcagaagtaagcctcatcatcagagcctttcctcaaaactggagtcccaaatgtcatcaggttttgttttttttcagccactaagaacccctctgcttttaactctagaatttgggcttggaccagatctaacatcttgaatactctgccctctagagccttcagccttaatggaaggttggatccaaggaggtgtaatggaatcggaatcaagccactcggcaggcatggagctataactaagcatccttagggttctgcctctccaggcattagccctcacattagatctagttactgtggtatggctaatacctgtcaacatttggaggcaatcctaccttgcttttgcttctagagcttagcatatctgattgttgtcaggccatattatcaatgtttacttttttggtactataaaagctttctgccacccctaaactccaggggggacaatatgtgccaatcaatagcacccctactcacatacacacacacctagccagctgtcaagggcagaatgaatctatgctggataagaaatggtggaactgcgttatgaagagctaatttactggacaaagaattc

SEQ ID NO: 132 - DNA, 3890 bp, Homo sapiens
atgaaggtgataagcttattcattttggtgggatttataggagagttccaaagtttttcaagtgcctcctctccagtcaactgccagtgggacttctatgccccttggtcagaatgcaatggctgtaccaagactcagactcgcaggcggtcagttgctgtgtatgggcagtatggaggccagccttgtgttggaaatgcttttgaaacacagtcctgtgaacctacaagaggatgtccaacagaggagggatgtggagagcgtttcaggtgcttttcaggtcagtgcatcagcaaatcattggtttgcaatggggattctgactgtgatgaagacagtgctgatgaagacagatgtgaggactcagaaaggagaccttcctgtgatatcgataaacctcctcctaacatagaacttactggaaatggttacaatgaactcactggccagtttaggaacagagtcatcaataccaaaagttttggtggtcaatgtagaaaggtgtttagtggggatggaaaagatttctacaggctgagtggaaatgtcctgtcctatacattccaggtgaaaataaataatgattttaattatgaattttacaatagtacttggtcttatgtaaaacatacgtcgacagaacacacatcatctagtcggaagcgctccttttttagatcttcatcatcttcttcacgcagttatacttcacataccaatgaaatccataaaggaaagagttaccaactgctggttgttgagaacactgttgaagtggctcagttcattaataacaatccagaatttttacaacttgctgagccattctggaaggagctttcccacctcccctctctgtatgactacagtgcctaccgaagattaatcgaccagtacgggacacattatctgcaatctgggtcgttaggaggagaatacagagttctattttatgtggactcagaaaaattaaaacaaaatgattttaattcagtcgaagaaaagaaatgtaaatcctcaggttggcattttgtcgttaaattttcaagtcatggatgcaaggaactggaaaacgctttaaaagctgcttcaggaacccagaacaatgtattgcgaggagaaccgttcatcagagggggaggtgcaggcttcatatctggccttagttacctagagctggacaatcctgctggaaacaaaaggcgatattctgcctgggcagaatctgtgactaatcttcctcaagtcataaaacaaaagctgacacctttatatgagctggtaaaggaagtaccttgtgcctctgtgaaaaaactatacctgaaatgggctcttgaagagtatctggatgaatttgacccctgtcattgccggccttgtcaaaatggtggtttggctactgttgaggggacccattgtctgtgccattgcaaaccgtacacatttggtgcggcgtgtgagcaaggagtcctcgtagggaatcaagcaggaggggttgatggaggttggagttgctggtcctcttggagcccctgtgtccaagggaagaaaacaagaagccgtgaatgcaataacccacctcccagtgggggtgggagatcctgcgttggagaaacgacagaaagcacacaatgcgaagatgaggagctggagcacttgaggttgcttgaaccacattgctttcctttgtctttggttccaacagaattctgtccatcacctcctgccttgaaagatggatttgttcaagatgaaggtccaatgtttcctgtggggaaaaatgtagtgtacacttgcaatgaaggatactctcttattggaaacccagtggccagatgtggagaagatttacggtggcttgttggggaaatgcattgtcagaaaattgcctgtgttctacctgtactgatggatggcatacagagtcacccccaaaaacctttctacacagttggtgagaaggtgactgtttcctgttcaggtggcatgtccttagaaggtccttcagcatttctctgtggctccagccttaagtggagtcctgagatgaagaatgcccgctgtgtacaaaaagaaaatccgttaacacaggcagtgcctaaatgtcagcgctgggagaaactgcagaattcaagatgtgtttgtaaaatgccctacgaatgtggaccttccttggatgtatgtgctcaagatgagagaagcaaaaggatactgcctctgacagtttgcaagatgcatgttctccactgtcagggtagaaattacacccttactggtagggacagctgtactctgcctgcctcagctgagaaagcttgtggtgcctgcccactgtggggaaaatgtgatgctgagagcagcaaatgtgtctgccgagaagcatcggagtgcgaggaagaagggtttagcatttgtgtggaagtgaacggcaaggagcagacgatgtctgagtgtgaggcgggcgctctgagatgcagagggcagagcatctctgtcaccagcataaggccttgtgctgcggaaacccagtaggctcctggaggccatggtcagcttgcttggaatccagcaggcagctggggctgagtgaaaacatctgcacaactgggcactggacagcttttccttcttctccagtgtctaccttcctcctcaactcccagccatctgtataaacacaatcctttgttctcccaaatctgaatcgaattactcttttgcctcctttttaatgtcagtaaggatatgagcctttgcacaggctggctgcgtgttcttgaaataggtgttaccttctctgggccttggttttttaaaatctgtaaaattagaggattgcactagagaaacttgaatgctccattcaggcctatcattttattaagtatgattgacacagcccatgggccagaacacactctacaaaatgactaggataacagaaagaacgtgatctcctgattagagagggtggttttcctcaatggaaccaaatataaagaggacttgaacaaaaatgacagatacaaactatttctatcctgagtagtaatctcacacttcatcctatagagtcaaccaccacagataggaattccttattctttttttaatttttttaagacagagtctcactttgttgcccaggctggagcgcagtggggtgatctcatctccctgcaacctccgcctcctgggttgaagcgattcttgtgcctcagcttcccaagcagctgggattacaggtgcccgccaccacgcccagctaatttttgcatttttagtagagatgggtttcaccatgttggccatgctcgtctccaactcctgacctcaggtaatccgtctgccttggcctcccaaatgctgggattacagacatgaaccaccacgcctggctggaatacttactcttgtcgggagattgaaccactaaaatgttagagcagaattcattatgctgtggtcacaggggtgtcttgtctgagaacaaatacaattcagtcttctctttggggttttagtatgtgtcaaacataggactggaagtttgcccctgttcttttttcttttgaaagaacatcagttcatgcctgaggcatgagtgactgtgcatttgagatagttttccctattctgtggatacagtcccagagttttcagggagtacacaggtagattagtttgaagcattgaccttttatttattccttatttctctttcatcaaaacaaaacagcagctgtgggaggagaaatgagagggcttaaatgaaatttaaaataagctatattatacaaatactatctctgtattgttctgaccctggtaaatatatttcaaaacttcagatgacaaggattagaacactcattaagatgctattcttc

SEQ ID NO: 133 - DNA, 4398 bp, Homo sapiens
ggccaaaggtcaagatacttctctgggaaatgttgctgctgatgctgctttacaaagtcatacaatgagtgtttggtttaagaaagattttcatacttaaaagattttcatcttggaaatacatcaagtgaaaattaaattcttttgggaaacattttccttctgatatattatacttgtaatgggcgacatggcaaacaactcagttgcttacagtggtgtgaaaaactctttgaaggaagctaatcatgatggagactttggaattacgctcgcagagctgcgggctctcatggagctcaggtccacagatgcattacgaaaaatacaggaaagctatggagatgtctatggaatttgcaccaaattgaaaacatctcccaatgaaggtttaagtggaaaccctgcagatttagaaagaagagaagcagtgtttggaaagaattttatacctcctaaaaagccaaaaacctttcttcaattagtatgggaagcattacaagatgtcactttaattatattagaaattgcagccatagtatcattgggcctttctttttatcagcctccagaaggggataatgcactttgtggagaagtttctgttggggaggaagaaggtgaaggtgaaactgggtggattgaaggagctgcaatcctcttgtctgtagtgtgtgtggtgttagtaacagctttcaatgactggagtaaggagaaacagtttagaggtttgcagagccgaattgaacaagaacagaagttcactgtcatcaggggtggtcaggtcattcagatacctgtagctgacattactgttggagatattgctcaagtgaaatatggtgatcttcttccagctgacggcatacttattcaaggcaacgatcttaaaattgatgaaagctcattgactggtgaatcagatcatgttaaaaagtctttagataaggatcccttacttctatcaggtactcatgtaagggaaggctctggaagaatggtagttacagctgtaggtgtaaattctcaaactggaattatctttaccttacttggagctggaggtgaagaggaagagaagaaagatgagaagaaaaaggaaaagaaaaataagaaacaagatggagctattgagaatcgcaacaaagcaaaagcccaggatggtgcagccatggaaatgcagccattgaagagtgaagaaggtggagatggtgatgaaaaagataaaaagaaagcaaatttgccaaaaaaggaaaaatctgttttacaagggaaacttacaaaactggctgttcagattggcaaagcaggtctgttgatgtctgccatcacagttatcattctagtattatattttgtcattgacaccttctgggttcagaaaagaccatggcttgctgagtgcacaccaatttatatacaatactttgtgaagttcttcattattggagttacagttttagtggtcgcagtgccagaaggtcttccacttgcagtcacgatctcactggcttattcagtcaaaaaaatgatgaaagataataacttagtaaggcatctggatgcttgtgaaaccatgggaaatgctacagctatttgttcagataaaacaggaactttgacaatgaacagaatgacagtcgttcaagcttacataaatgaaaaacattataaaaaggttcctgaaccagaagctattccaccaaatattttgtcctatcttgtaacaggaatttctgtgaattgtgcttatacatcaaaaatattgccaccagagaaagagggtggattacctcgtcacgttggtaataaaactgaatgtgccttgttgggacttcttttggatttaaaacgggattatcaggatgttagaaatgaaataccagaagaagcactgtacaaagtctacaccttcaattctgttaggaagtccatgagtactgtcctgaaaaattcagatggaagttatcgaatattcagcaagggtgcatctgagataattctgaaaaagtgtttcaaaatcttgagtgctaatggtgaggcaaaagtattcagaccaagggaccgtgatgatattgtaaaaactgtgattgaaccgatggcatcagaaggcttgagaaccatatgtcttgcattcagagattttccagcaggagaaccagaaccagagtgggataatgaaaatgatattgtcaccggccttacatgcattgctgttgtggggattgaagatcctgtgagacctgaggtgccagatgcaattaaaaagtgtcagagggctggaattactgtgcggatggtcactggtgataatattaatactgctcgggccattgctaccaaatgtggtattttacatcctggggaagattttctgtgcctagaaggtaaagattttaacagaagaatacgaaatgaaaaaggagagattgagcaagagaggatagacaagatttggccaaaacttcgagtacttgcaagatcatctcctactgataagcatacactggttaaaggtataattgacagcactgtctcagaccaacgccaggttgtagctgtaactggtgatggtacaaatgatggcccagcactaaagaaagcagatgttggatttgcaatgggtattgctggaactgatgtagctaaagaagcatccgatattattctcacagatgacaactttacaagcattgttaaagcagttatgtggggacgaaatgtctatgacagcatctcaaaattccttcagttccaacttactgttaatgtagtagcagtgattgttgcttttacgggcgcctgcattactcaagactcaccgcttaaggctgtgcagatgctgtgggtaaacctcataatggatacactcgcttccctggctctggcaacggaaccacccactgagtctctcttgcttcggaaaccttatggtagaaataagcctctcatctcacgtacaatgatgaagaatattttgggtcatgcattctatcaacttgtagtagtctttacactcttatttgctggagaaaagttttttgacattgatagtggaagaaatgctcctttgcatgctcctccttcagaacattatactattgtttttaatacctttgtgctgatgcaacttttcaacgaaataaatgcccggaaaattcatggtgaaagaaatgtattcgaaggaatctttaacaatgccatcttctgcacaattgttttaggcacttttgtggtacagataataattgtgcagtttggtggaaaacctttcagttgttcagaactttcaatagaacagtggctatggtcaatattcctaggaatgggaacattactctggggccagcttatttcaacaattccaactagccgtttaaaattcctcaaagaagctggtcatggaacacaaaaggaagaaatacctgaggaggaattagcagaggatgttgaagagattgatcacgctgaaagggagttgcggcgtggccaaatcttgtggtttagaggtctgaacagaatccaaacacagattcgagtggtgaatgcatttcgtagttctttatatgaagggttagaaaaaccggaatcaagaagttcgattcacaactttatgacacatcctgagtttaggatagaagattcagagcctcatatcccccttattgatgacactgatgccgaagatgatgctcctacaaaacgtaactccagtcctccaccctctcccaacaaaaataacaatgctgttgacagtggaattcaccttacaatagaaatgaacaagtctgctacctcttcatccccaggaagcccactacatagtttggaaacatcactctgattgtaagctgaatgttaacacactagctgcattgtaaagaaacaaattgaaactgggtcttttcacatattgtgatggacaagctagtattcttgtctttggacttcaacagaagacacacttgtacgaatgtagatttatttttttaaaaaaaaaaaagcaaagctttctgccagactgagggtgctttttggggggtgggagaaatgaactgacagataaacagtaactcagcgtaagtgacctgtggatcatcagtagtacccaagcatggtcctgaacagtgtattagcagagctttagtttatctcagtcctggatgggagagagagggaggagtaaaactgggcaagacaaagagccctggatcgttgaattgatagtttaatttctgctgttggctgttaataatttggattatttatgtttataaatgatacagatctgtttacaaggtttgtagatactttttttgttcctgttcatagatgggaagcttccttataactgatgcagagaaaaattagtccttcaaatactgctgtattttcagg

SEQ ID NO: 134 - DNA, 5768 bp, Homo sapiens
tctacttatattcaatccacagggctacacctagttcttggtacacagtacatgctcagcaagagtctgttgaatgaacacatacatggtttatctgtttgtctcttccgagttcttgacttctgtctgctctgacctctggcagctttccactagtttctagctttcattctgcttacctggatttcggaactctagcctgccccactcttagataaacgcatgccctctgtggccctggaaccttagtgacttctgctataccaaagtctccacgcccagggtgacacgcagctgcagctccgtaaacctctaacatgatgtcagcaaatattaaaaaaaaaaagtttataaaaacaatgaataaactttgttaaaggtacaaatgaaaattagcaaacatgggaagataattgagtaaagagtttaaagttaaaaacgaattgcagtcattctaggggaaggaacagttgtatttgaaaacctgtatggttacatgaactgcctaaaaaacaagctaaggaaaattaaagctcagatttatatattttaagaaattaattgcaattaatttcctgggattaaatagcatttcctcaaccccagctgtcattaaaaagaggcaaatacagccaaggactggatcttctccggaaggctgacagcactgaccctcaagaaggcaccggctgacagacagaacattctgccctaatatgtgctgaaattccgctgagagcagagtggtacattgaaccctttaggggcttacaaaagaagtgtcctgtgttttagagtcacagagttttgcagaaacaagtatgaattcacctagtggccccctgcaccaggtctttcctgtgggcactgagtgcagacacatcaatatgtaatagcagaatgaatgactgaacgaacgattgaatgaaaagaaatgagaggcagcaggttgtcagattctatgaggcaatcacagcatcaggtgaccttagtatctatttgagaggactgccatttattctcgggagcgcacggctctaaagaggcccatatccaggcagtgagctctggtggggggcgcctttagatgcaagaaggaggaaacagctcgaaatccctgggcctgagcgcggcccgtgcaggccggagggtcaagaactctccaccggcggcagcggcccggtgtctgccccggcttcgccccggcctaaggctgcctgtgctataaatacgcggcccacatgccgcggtgacacggtgttccctgggctcggcgggacagataacatgaatgtgccctttaaacgtcccaagttgcagggacagcccccggcccagcctcgctcccggaagcgccttcgcccccgatgccctctgcagctgggaggagggggcgccccgcacctgcccagccaatgcgcggcgcgagcgccggccgcgacccgcctcctctcgcgagagcccggcggggatataagggggagctgcgggccaggcggcggccccctagcgtcgcgcagggtcggggactgcgcgcggtgccaggccgggcgtgggcgagagcacgaacgggctgcctgcgggctgagagcgtcgagctgtcaccatgggtgatcacgcttggagcttcctaaaggacttcctggccgggggcgtcgccgctgccgtctccaagaccgcggtcgcccccatcgagagggtcaaactgctgctgcaggtgaggaccgcgcggtgcaagaggcgggcgcgggcgcggcgggccgggcggggcgcgcgatgcggcgcgagctgcagggcgcggggcgccgcggaaaatctgcgccaggccacaggcccgggcgcccgcccgcccgcgggggaagaaggtgccctctgcgtagagacaggtccagcgtcagtcgcagattcctggtgtcgggtggcgcccggcgttcgggtgtctatatatggaaacccacccggagccggtttacgtgtgccagatcctgcgcccgtgacagcacgggcgtgcactcaggcccggaggcacctagtgattgccagtatttttggcaccgtcttatgcgcacgcacctttacaataaaaacatcaaaataatcatcacccaagaattcccttatcgtatctcatgcacaatgctgtatgtaggctgacgccttcatctttatgtaacctctgtgagagagttattcttctccattttacagatgaagctgaggttttgaaatattaagaaacaattttcggaataaactcagatcatcctgtctccaaatcttttcctcccctacctggtcgctgaatggtttatcatcctctcgtgttttcctccacctgcccaaaaggtcagggcccctcaatgaggaagagcccaatttgggagtcagaattactaacaacaaaacccccacaaattgctcacaacggcagcaaacccttaataattgattacttggattatctgcttgaaaactttggaggcctaatgtttagtggatttattctccttcctctattagagcatctagtagagatcctcatctccagggtgatcagagtgacactgagaaattgtcattttttggccatcatgtctattaaatccaaagccctttgaagcagggagtgttactcatttctgtcccccagtaagcccctcatacagttctcaaacctagggaaagtgaaataaataaatggctatagctttatataattcaatcaccttttcagtttatttggggcaatacctttccctcaaataccctaataattgaagcaacattggattattttggcttgttatccagtaactaacatggataacagtatccatttacacgtcctcgtatccatttgatttcctcatcctttttttcttcaaaaaaaaaatctaggaagtgcaaaccttttttttttctcctgtcctcttcccttctctctaccctgcctgtcctctgtcacccaccctcccctccaccaggtccagcatgccagcaaacagatcagtgctgagaagcagtacaaagggatcattgattgtgtggtgagaatccctaaggagcagggcttcctctccttctggaggggtaacctggccaacgtgatccgttacttccccacccaagctctcaacttcgccttcaaggacaagtacaagcagctcttcttagggggtgtggatcggcataagcagttctggcgctactttgctggtaacctggcgtccggtggggccgctggggccacctccctttgctttgtctacccgctggactttgctaggaccaggttggctgctgatgtgggcaagggcgccgcccagcgtgagttccatggtctgggcgactgtatcatcaagatcttcaagtctgatggcctgagggggctctaccagggtttcaacgtctctgtccaaggcatcattatctatagagctgcctacttcggagtctatgatactgccaagggtgagagaggggcatcggggagaaggagggtggtgtggaaagaggatcctatgggatctataactcacaaaggacctgatatatattgatcttgttttttctagtctctgggataattgaggcttctgaatgaggaggtgatgtgcataagttaatagctgaagcgttccttgtgtcctctactgaaataaactctggcctttagttattcagagaggaggaggggggagcctgtctccctctagacacagccatagcagttactgagtttaacttgaagccacttccaatgccctgtatacaagctgagcactgcccctccggggtccggagagggcagcagccacctttgctgtctgcctggtcatatgtgaagcacctgcacaggggcaggttccccgcaaggtcagagcatggagctggaggtgcagtggcctctctccctccacctgctttctgctgagaacaggcacttcatagccgttcggcttctgggctctgtccacagggatgctgcctgaccccaagaacgtgcacatttttgtgagctggatgattgcccagagtgtgacggcagtcgcagggctggtgtcctacccctttgacactgttcgtcgtagaatgatgatgcagtccggccggaaagggggtaagcttgtgctctactcatctaaacttgtttggttttgcccgaggagaacattttacagggctcctttcagtcttccttactggaaattaattttcaaaattatttgataaggacttagggaagaaagatggtattaattccccctaacgttctcaactatcctattagggaaaagtattttccattttattagagatgataagaacatgaatagtaagacatttagatgtgaatttaactaggtatccagcattatagagaccctaggccctcttcccttagagcctgggtgcaaaagctagggaaaagaagtagttagctacttcttacaaagaactcttgcttccctcctagttacaggtgttagtgggatggggtgtttagctgggtagagatggcctgaagcaatctgttgtgccagagaaagttttggcttctataggttgaaccatatgaaattgccactttaaaagtcaaaaacagtccaatgttagcagtttcgtatgtttcaacgaatagttacagccttttatttagactgcataacctcgtgcaggatcatctgaggctcagcctcagttcggtcctccataaaaaaaggtaaccgcgtagcataatactcctgctccactgcgcccttcttgtttcgcagttgggcagtccatgaattacttggttaattgccccagttcttcactgaccttgaactaatggagtaggaatgacaggagacccagcctgccagtgaagcaaggaaggagatgtccagtgggatgttgcatggagctgggactccatgcccagatgaccctgattttataaaactggtaacagtgtgtacagatatgtttcaggggaaaagtctctttcctccagcgttacggagccctcaccagcatttgtttccacagccgatattatgtacacggggacagttgactgctggaggaagattgcaaaagacgaaggagccaaggccttcttcaaaggtgcctggtccaatgtgctgagaggcatgggcggtgcttttgtattggtgttgtatgatgagatcaaaaaatatgtctaatgtaattaaaacacaagttcacagatttacatgaacttgatctacaagttcacagatccattgtgtggtttaatagactattcctaggggaagtaaaaagatctgggataaaaccagactgaaggaatacctcagaagagatgcttcattgagtgttcattaaaccacacatgtattttgtatttattttacatttaaattcccacagcaaatagaaaataatttatcatacttgtacaattaactgaagaattgataataactgaatgtgaaacatcaataaagaccacttaatgcacgctttctattttattgaactcttattaactgtaaaatgcatttttaaaagatcaaaaatgcatattttctagcatgattcatgtatcagtcagcagccaagcttctaaatgccagatattatattgagaatgtattatatgagaacgtacaatgcttaaagttccggttttcaaacttaggcaggtcatattctatctatcttatccagcgttactgtaggctagaaagtgataatggctttcataatcctgccttgtcttaggcactttcctgcag

SEQ ID NO: 135 - DNA, 2865 bp, Homo sapiens
ccagcggccgccgacgctaggaggccgcgctccgcccccgctaccatgaggccccggaaagccttcctgctcctgctgctcttggggctggtgcagctgctggccgtggcgggtgccgagggcccggacgaggattcttctaacagagaaaatgccattgaggatgaagaggaggaggaggaggaagatgatgatgaggaagaagacgacttggaagttaaggaagaaaatggagtcttggtcctaaatgatgcaaactttgataattttgtggctgacaaagacacagtgctgctggagttttatgctccatggtgtggacattgcaagcagtttgctccggaatatgaaaaaattgccaacatattaaaggataaagatcctcccattcctgttgccaagatcgatgcaacctcagcgtctgtgctggccagcaggtttgatgtgagtggctaccccaccatcaagatccttaagaaggggcaggctgtagactacgagggctccagaacccaggaagaaattgttgccaaggtcagagaagtctcccagcccgactggacgcctccaccagaagtcacgcttgtgttgaccaaagagaactttgatgaagttgtgaatgatgcagatatcattctggtggagttttatgccccatggtgtggacactgcaagaaacttgcccccgagtatgagaaggccgccaaggagctcagcaagcgttctcctccaattcccctggcaaaggtcgacgccaccgcagaaacagacctggccaagaggtttgatgtctctggctatcccaccctgaaaattttccgcaaaggaaggccttatgactacaacggcccacgagaaaaatatggaatcgttgattacatgatcgagcagtccgggcctccctccaaggagattctgaccctgaagcaggtccaggagttcctgaaggatggagacgatgtcatcatcatcggggtctttaagggggagagtgacccagcctaccagcaataccaggatgccgctaacaacctgagagaagattacaaatttcaccacactttcagcacagaaatagcaaagttcttgaaagtctcccaggggcagttggttgtaatgcagcctgagaaattccagtccaagtatgagccccggagccacatgatggacgtccagggctccacccaggactcggccatcaaggacttcgtgctgaagtacgccctgcccctggttggccaccgcaaggtgtcaaacgatgctaagcgctacaccaggcgccccctggtggtcgtctactacagtgtggacttcagctttgattacagagctgcaactcagttttggcggagcaaagtcctagaggtggccaaggacttccctgagtacacctttgccattgcggacgaagaggactatgctggggaggtgaaggacctggggctcagcgagagtggggaggatgtcaatgccgccatcctggacgagagtgggaagaagttcgccatggagccagaggagtttgactctgacaccctccgcgagtttgtcactgctttcaaaaaaggaaaactgaagccagtcatcaaatcccagccagtgcccaagaacaacaagggacccgtcaaggtcgtggtgggaaagacctttgactccattgtgatggaccccaagaaggacgtcctcatcgagttctacgcgccatggtgcgggcactgcaagcagctagagcccgtgtacaacagcctggccaagaagtacaagggccaaaagggcctggtcatcgccaagatggacgccactgccaacgacgtccccagcgaccgctataaggtggagggcttccccaccatctacttcgcccccagtggggacaaaaagaacccagttaaatttgagggtggagacagagatctggagcatttgagcaagtttatagaagaacatgccacaaaactgagcaggaccaaggaagagctttgaaggcctgaggtctgcggaaggtgggaggaggcagacgccctgcgtggcccatggtcggggcgtccaccggaggccggcaacaaacgacagtatctcggattcctttttttttttttttaattttttatactttgttgtttcacttcatgctctgaatactgaataaccatgaatgactgaatagtttagtccagatttttacagaggatacatctatttttatcattatttggggtttgaaaaatttttttttacaccttctaatttctttatttctcaaagcagataattcttctgtgtgaaaatgttttctttttttaatttaaggtttaaaattccttttccaaatcatgttgattttgctctttaaaaaaaaaaaaaaaaaaaaaaaaaaaaaaaaaaaaagaagggctgggaccaaccgggtgagatccacaagtctctggatgtggctgaaggcaaatacacaattgaagtactttctgttttgaagtgctttcccttttgaatctggtttgaaacatgcagcttctgtctctagcccaaggaaagaccaaaacatagggaaataaaagcatttatctttgtcttggaagtaattgttgaagttgtgcagttgatcagtgcacagttagctgcaatgtttatagaaattgattgttaaaccaaatttacactggcatgtgtggtgtagtttctaaaaggcacttcacatttgaaatttttcttaccttagaaagtttctagtgatctaaatgtctagttttgtattcttttgtgtgtgttcactgtttctcagtattaccacttgaataattctctgtacaggggggtttgtgctatacactgggatgtctaattgcagcaataaagcctttcttt

SEQ ID NO: 136 - DNA, 2625 bp, Homo sapiens
tcaggagaacctcagtctgacgacattgaagctagccgaatgaagcgagcagctgcaaagcatctaatagaacgctactaccaccagttaactgagggctgtggaaatgaagcctgcacgaatgagttttgtgcttcctgtccaacttttcttcgtatggataataatgcagcagctattaaagccctcgagctttataagattaatgcaaaactctgtgatcctcatccctccaagaaaggagcaagctcagcttaccttgagaactcgaaaggtgcccccaacaactcctgctctgagataaaaatgaacaagaaaggcgctagaattgattttaaagatgtgacttacttaacagaagagaaggtatatgaaattcttgaattatgtagagaaagagaggattattcccctttaatccgtgttattggaagagttttttctagtgctgaggcattggtacagagcttccggaaagttaaacaacacaccaaggaagaactgaaatctcttcaagcaaaagatgaagacaaagatgaagatgaaaaggaaaaagctgcatgttctgctgctgctatggaagaagactcagaagcatcttcctcaaggataggtgatagctcacagggagacaacaatttgcaaaaattaggccctgatgatgtgtctgtggatattgatgccattagaagggtctacaccagattgctctctaatgaaaaaattgaaactgcctttctcaatgcacttgtatatttgtcacctaacgtggaatgtgacttgacgtatcacaatgtatactctcgagatcctaattatctgaatttgttcattatcggaatggagaatagaaatctccacagtcctgaatatctggaaatggctttgccattattttgcaaagcgatgagcaagctaccccttgcagcccaaggaaaactgatcagactgtggtctaaatacaatgcagaccagattcggagaatgatggagacatttcagcaacttattacttataaagtcataagcaatgaatttaacagtcgaaatctagtgaatgaatttaacagtcgaaatctagtgaatgatgatgatgccattgttgctgcttcgaagtgcttgaaaatggtttactatgcaaatgtagtgggaggggaagtggacacaaatcacaatgaagaagatgatgaagagcccatccctgagtccagcgagctgacacttcaggaacttttgggagaagaaagaagaaacaagaaaggtcttcgagtggaccccctggaaactgaacttggtgttaaaaccctggattgtcgaaaaccacttatcccttttgaagagtttattaatgaaccactgaatgaggttctagaaatggataaagattatacttttttcaaagtagaaacagagaacaaattctcttttatgacatgtccctttatattgaatgctgtcacaaagaatttgggattatattatgacaatagaattcgcatgtacagtgaacgaagaatcactgttctctacagcttagttcaaggacagcagttgaatccatatttgagactcaaagttagacgtgaccatatcatagatgatgcacttgtccggctagagatgatcgctatggaaaatcctgcagacttgaagaagcagttgtatgtggaatttgaaggagaacaaggagttgatgagggaggtgtttccaaagaattttttcagctggttgtggaggaaatcttcaatccagatattggtatgttcacatacgatgaatctacaaaattgttttggtttaatccatcttcttttgaaacagagggtcagtttactctgattggcatagtactgggtctggctatttacaataactgtatactggatgtacattttcccatggttgtctacaggaagctaatggggaaaaaaggacttttcgtcgacttgggagactctcacccagttctatatcagagtttaaaagatttattggagtatgttgggaatgtggaagatgacatgatgatcactttccagatatcacagacaaatctttttggtaacccaatgatgtatgatctaaaggaaaatggtgataaaattccaattacaaatgaaaacaggaaggaatttgtcaatctttattctgactacattctcaataaatcagtagaaaaacagttcaaggcttttcggagaggttttcatatggtgaccaatgaatctcccttaaagtacttattcagaccagaagaaattgaattgcttatatgtggaagccgcaatctagatttccaagcactagaagaaactacagaatatgacggtggctataccagggactctgttctgattagggagttctgggaaatcgttcattcatttacagatgaacagaaaagactcttcttgcagtttacaacgggcacagacagagcacctgtgggaggactaggaaaattaaagatgattatagccaaaaatggcccagacacagaaaggttacctacatctcatacttgctttaatgtgcttttacttccggaatactcaagcaaagaaaaacttaaagagagattgttgaaggccatcacgtatgccaaaggatttggcatgctgtaa

SEQ ID NO: 137 - DNA, 1966 bp, Homo sapiens
tctttcttcatccccgcattcccaatatacccaggccacaagagccgagaactgtcgcccttccacgatgtggctccgtgcctttatcctggccactctctctgcttccgcggcttgggggcatccgtcctcgccacctgtggtggacaccgtgcatggcaaagtgctggggaagttcgtcagcttagaaggatttgcacagcctgtggccattttcctgggaatcccttttggcaagccgcctcttggacccctgaggtttactccaccgcagcctgcagaaccatggagctttgtgaagaatgccacctcgtaccctcctatgtgcacccaagatcccaaggcggggcagttactctcagagctatttacaaaccgaaaggagaacattcctctcaagctttctgaagactgtctttacctcaatatttacactcctgctgacttgaccaagaaaaacaggctgccggtgatggtgtggatccacggaggggggctgatggtgggtgcggcatcaacctatgatgggctggcccttgctgcccatgaaaacgtggtggtggtgaccattcaatatcgcctgggcatctggggattcttcagcacaggggatgaacacagccgggggaactggggtcacctggaccaggtggctgccctgcgctgggtccaggacaacattgccagctttggagggaacccaggctctgtgaccatctttggagagtcagcgggaggagaaagtgtctctgttcttgttttgtctccattggccaagaacctcttccaccgggccatttctgagagtggcgtggccctcacttctgttctggtgaagaaaggtgatgtcaagcccttggctgagcaaattgctatcactgctgggtgcaaaaccaccacctctgctgtcatggttcactgcctgcgacagaagacggaagaggagctcttggagacgacattgaaaatgaaattcttatctctggacttacagggagaccccagagagagtcaaccccttctgggcactgtgattgatgggatgctgctgctgaaaacacctgaagagcttcaagctgaaaggaatttccacactgtcccctacatggtcggaattaacaagcaggagtttggctggttgattccaatgttgatgagctatccactctccgaagggcaactggaccagaagacagccatgtcactcctgtggaagtcctatccccttgtttgcattgctaaggaactgattccagaagccactgagaaatacttaggaggaacagacgacactgtcaaaaagaaagacctgttcctggacttgatagcagatgtgatgtttggtgtcccatctgtgattgtggcccggaaccacagagatgctggagcacccacctacatgtatgagtttcagtaccgtccaagcttctcatcagacatgaaacccaagacggtgataggagaccacggggatgagctcttctccgtctttggggccccatttttaaaagagggtgcctcagaagaggagatcagacttagcaagatggtgatgaaattctgggccaactttgctcgcaatggaaaccccaatggggaagggctgccccactggccagagtacaaccagaaggaagggtatctgcagattggtgccaacacccaggcgggccagaagctgaaggacaaagaagtagctttctggaccaacctctttgccaagaaggcagtggagaagccaccccagacagaacacatagagctgtgaatgaagatccagccggccttgggagcctggaggagcaaagactggggtcttttgcgaaagggattgcaggttcagaaggcatcttaccatggctggggaattgtctggtggtggggggcaggggacagaggccatgaaggagcaagttttgtatttgtgacctcagctttgggaataaaggatcttttgaaggccaca

SEQ ID NO: 138 - DNA, 1792 bp, Homo sapiens
gaattccatatcatggcctgccgccgccgccgccgccgccggagctctgtagtatggcatcgaggagaatggagaccaaacctgtgataacctgtctcaaaaccctcctcatcatctactccttcgtcttctggatcactggggtgatcctgctggctgttggagtctggggcaaacttactctgggcacctatatctcccttattgccgagaactccacaaatgctccctatgtgctcatcggaactggcaccactattgttgtctttggcctgtttggatgctttgctacatgtcgtggtagcccatggatgctgaaactgtatgccatgtttctgtccctggtgttcctggctgagctcgtagctggcatttcagggtttgtgtttcgtcatgagatcaaggacaccttcctgaggacttacacggacgctatgcagacttacaatggcaatgatgagaggagccgggcagtggaccatgtgcagcgcagcctgagctgctgtggtgtgcagaactacaccaactggagcaccagcccctacttcctggagcatggcatcccccccagctgctgcatgaacgaaactgattgtaatccccaggatctacacaatctgactgtggccgccaccaaagttaaccagaagggttgttatgatctggtaactagtttcatggagactaacatgggaatcatcgctggagtggcgtttggaatcgcattctcccagttaattggcatgctgctggcctgctgtctgtcccggttcatcacggccaatcagtatgagatggtgtaaggagaagtctttcaagaatgacggaataagagacctgttttaaaaaggaactgcagcaatctttgaaagacttccaaagaatgttagagcacagtacataatacacttgccctgctccctctaccccttaccccacaacgtgcaactgacactcccacccagtctctgctccacctttcagcccacgtcacgtgtagtgtccattttgtgaagccctgttgtgccacagagtgtagccaggtccccctgcagctagtcctagtgaacctcaccccgaggccctgcatgggccagcccctccatctgtacttggtccaactgcaactcatcatcggtgactggttatcacaccatcgctggcccctttgggccctgcatgtagtgtgggaggctcctgttagctcctcactgtggtaaatgccacacacctttaagtagataagcagacgatagttatctgttcttttgacttaatctcatttggtttgattttccctctactaaggctttcctaccttcttcaggctgcctaagacatgtaacgaaacacttcaataattgtccatgaggagaaaaaaagcatgtgtcatgcatgaaggaaactgaacttgaggtggcctccttgcttgttacatacctgggtatgtgtaggcagtttagtgcatctttgcctctcagttgaaacctgtataaccctgttacaaagctgtgttgttgcttcttgtgaaggccatgatattttgtttttccccaattaattgctattgtgttattttactacttctctctgtattttttcttgcattgacattatagacattgaggacctcatccaaacaatttaaaaatgagtgtgaagggggaacaagtcaaaatatttttaaaagatcttcaaaaataatgcctctgtctagcatgccaacaagaatgcattgatattgtgaacatttgtgatatatgtattaataaatagagcaattacggaattc

SEQ ID NO: 139 - DNA, 655 bp, Homo sapiens
ccaatggccattagccttcacccatccgcacgacctcatttacatcccctattcttatcatcttccagaccacctcgagagccaggggttcagagcccctctttcctaatgagggctcccaggacaggatgaggtgcctgcctgaggtcacacggcagggagtgcagctccccctgccccgacctgctgagccccatcacttccgcagatcctggcattctctcagaagctgtactacgacaaggaacagacagtgagcatgaaggacaatgtcaggcccctgcagcagctggggcagcgcacggtgataaagtccggggccccgggtcggccgctgccctgggccctgcctgccctgctgggccccatgctggcctgcctgctggccggcttcctgcgatgatggctcacttctgcacgcagcctctctgttgcctcagctctccaagttccaggcttccggtccttagccttcccaggtgggactttaggcatgattaaaatatggacatatttttggagaaacctttctcaagtgtgtttttagccttccacaactaccccaccctgtccccctccacccacccctgttcctcctgttccagggcgggggctttaaggccaggagatttctccaagcaggtaccaccaggtg

SEQ ID NO: 140 - DNA, 1344 bp, Homo sapiens
cagaactcaggctgcctccagccagcctttgcccgctagactcactggccctgagcacttgaaggtgcagcaagtcactgagaatgagcactttcttctcggacacagcatggatctgcctggctgtccccacagtactatgtgggacagtattttgcaaatacaagaagagctcagggcagctgtggagctggatggtctgcctggcaggcctctgtgcagtctgcctgctcatcctgtcccctttttggggcttgatcctcttctcggtgtcatgcttcctcatgtatacttacttatctggccaagaattgttacctgtggatcagaaggcagtcctggtgacaggtggtgattgcgggcttggccatgctttgtgcaagtatctggatgagctgggcttcacggtatttgccggagttttgaatgaaaatggcccaggagctgaggaattgcgaagaacctgctctccgcgcctctcggtgctccaaatggacatcacgaagccagtgcagataaaagatgcttacagcaaggttgcagcaatgctgcaggacagaggactgtgggctgtgatcaacaatgctggggtgcttggctttccaactgatggggagcttcttcttatgactgactacaaacaatgcatggccgtgaacttctttggaactgtggaggtcacaaagacgtttttgcctcttcttagaaaatccaaagggaggctggtgaatgtcagcagcatgggaggaggggccccaatggaaaggctggcatcttatggctcatcaaaggcggctgtgaccatgttctcatcagttatgagactggagctttccaagtggggaattaaagttgcttccatccaacctggaggcttcctaacaaatatcgcaggcaccagtgacaagtgggaaaagctggagaaggacattctggaccacctccccgctgaggtacaggaagactacggccaggactacatcttagcacagcggaatttcctcctattgatcaactcgttagccagcaaggacttctctccggtgctgcgggacatccagcatgctatcttggcgaagagcccttttgcctattacacgccagggaaaggcgcttacttgtggatctgccttgctcactatttgcctattggcatatatgattactttgctaaaagacattttggccaagacaagcccatgcccagagctctaagaatgcctaactacaagaaaaaggccacctaggcaatggaagccctcaaagaagtcggaatgtcatagtcttgaaatgaaagggaaactgggaaactgggtttctcattaaagttgtttcccactctga

SEQ ID NO: 141 - DNA, 2828 bp, Homo sapiens
agcagccggcacggggacagccggccgcacaacggatctgcaggcgcggagcaaaatgcacccgccgcgccgcgcggtcctgcagccccgccacggccccgcggcccgcacccccccggggcgacagtgagcctctcccgccaccaccgggggccgagcggagggctctcgggtgggagagcgggaccagatctcgacagctgttcatttccaggaagccaccgcagccagagcgaaaggggaccttctgccaccagcggggcatcagccagcggcgcgcatggatttatgaagacactcatgcaagaagtgggcaggacttggacaaacttttccaccggctccgcgtccgccgctccccgcgcctcgtctcctttcccctcctctcccggcggccgccgctgcccgcgatggtggccgcgctgctgggcggcggcggcgaggcccgcggggggacagtgccgggcgcctggctgtgcctgatggcgctgctgcagctgctgggctcggcgccgcggggatcggggctggcgcacggccgccgcctcatctgctggcaggcgctgctgcagtgccagggggagccggagtgcagctacgcctacaaccagtacgccgaggcgtgcgcgccggtgctggcgcagcacggcgggggcgacgcgcccggggccgccgccgccgctttcccggcctcggccgcctctttctcgtcgcgctggcgctgcccgagtcactgcatctcggccctcattcagctcaaccacacgcgccgcgggcccgccctggaggactgtgactgcgcgcaggacgagaactgcaagtccaccaagcgcgccattgagccgtgcctgccccggacgagcggcggcggcgcgggcggccccggcgcgggcggggtcatgggctgcaccgaggcccggcggcgctgcgaccgcgacagccgctgcaacctggcgctgagccgctacctgacctactgcggcaaagtcttcaacgggctgcgctgcacggacgaatgccgcaccgtcattgaggacatgctggctatgcccaaggtggcgctgctcaacgactgcgtgtgcgacggcctcgagcggcccatctgcgagtcggtcaaggagaacatggcccgcctgtgcttcggcgccgagctgggcaacggccccggcagcagcggctcggacgggggcctggacgactactacgatgaggactacgatgacgagcagcgcaccgggggcgcgggtggtgagcagccgctggacgacgacgacggcgtcccgcacccaccgcgcccgggcagcggcgctgctgcatcgggcggccgcggggacctgccctatgggcctgggcgcaggagcagcggcggcggcggccgcttggcgccccggggcgcctggaccccactcgcctccatcttgctgctgctgcttgggccgctcttttagccctcgcgccccccgccgttggctgcgggagagcccgcgtcccactcccgtgctcgcctcgaccccgcgccgggcacctgtggcttgggacagatagaagggatggttggggatacttcccaaaactttttccaagtcaacttggtgtagccggttccccggccacgactctgggcacttcccctgaagctcctctccggagcttgacttcttggacctcctcccccgccccaattccaagctccagaaactcccaactcgtctgccgtccagaaagctagctgcagtgttcaggacgtccgggaggaagcaagcatgtgggggacagaacagtagtcctggactcgaaagggaaggtgctgaccagtggggccttagcaatttgaagggttgggaaggaggaattatatttgcaaaggggctgtctattagcatatttcctttgagggggcaaaaaaaagtgccagtatcgacttttacagattgtggccagtgaggatattataatcctatgtaaacagaaaagtcccacttaccgattcattctttcactgtttgtatctgcgcccagaattctcagtgacgtgggggtgagggtgggtggcgattgccttagagggaacccctaaattggttttggataagtttgagcccttgaccttaatttcattgctaccactctgatctcttagcacatttcttaggattaagggtccaaaaatgctgatctaaggggttgccatggtgttgaacaatgcaactttttatttaaaaaagctctgcactgccatgtatgaaagtctctttatgatgtttgtttttttgtcatttttgttctttacatcaagaaattttatgtttaaatatgcggagaatgtatattgcctctgctcctatcagggttgctaaaccctggtacatcgtatataaaatgtattaaaactggggtttgttaccagttgctgtactttgtatatagaatttttataaattgtatgcttcagaaataatttatttttaaaaagaaattaaaagttttaaactcacatccatattacacctttcccccctgaaatgtatagaatccatttgtcatcaggaatcaaaacccacagtccattgtgaagtgtgctatatttagaacagtcttaaaatgtacagtgtattttatagaattgaagttaacattcttattttcaagagaatttatggacgttgtagaaatgtacaaatgcatttccaaactgccttaaacgttgtatttttatagacatgtttttttaaaaatcctaagtttttaaataactatggatttgtgtattttttttggttatttgttttattaaaacatgtacatcagtaaagagttttaaacaatga

SEQ ID NO: 142 - DNA, 2848 bp, Homo sapiens
cgcggcactcgcgcgcgatcccggccggcggcgcgccggcgggccaggcggcgccacagcccatggagctcgagaacatcgtagcgaacacggtgctactcaaggcccgggaaggtggcggtggaaatcgcaaaggcaaaagcaagaaatggcggcagatgctccagttccctcacatcagccagtgcgaagagctgcggctcagcctcgagcgtgactatcacagcctgtgcgagcggcacgccattgggcgcctgctgttccgagagttctgtgccacgaggccggagctgagccgctgcgtcgccttcctggatggggtggccgagtatgaagtgaccccggatgacaagcggaaggcatgtgggcggcacgtaacgcagaattttctgagccacacgggtcctgacctcatccctgaggtcccccggcagctggtgacgaactgcacccagcggctggagcagggtccctgcaaagaccttttccaggaactcacccggctgacccacgagtacctgagcgtggccccttttgccgactacctcgacagcatctacttcaaccgtttcctgcagtggaagtggctggaaaggcagccagtgaccaaaaacaccttcaggcaataccgagtcctgggcaaaggtggctttggggaggtgtgcgcctgccaggtgcgggccacaggtaagatgtatgcctgcaagaagctagagaaaaagcggatcaagaagcggaaaggggaggccatggcgctgaacgagaagcagatcctggagaaagtgaacagtaggtttgtagtgagcttggcctacgcctatgagaccaaggacgcgctgtgcctggtgctgacactgatgaacgggggcgacctcaagttccacatctaccacatgggccaggctggcttccccgaagcgcgggccgtcttctacgccgccgagatctgctgtggcctggaggacctgcaccgggagcgcatcgtgtacagggacctgaagcccgagaacatcttgctggatgaccacggccacatccgcatctctgacctgggactagctgtgcatgtgcccgagggccagaccatcaaagggcgtgtgggcaccgtgggttacatggctccggaggtggtgaagaatgaacggtacacgttcagccctgactggtgggcgctcggctgcctcctgtacgagatgatcgcaggccagtcgcccttccagcagaggaagaagaagatcaagcgggaggaggtggagcggctggtgaaggaggtccccgaggagtattccgagcgcttttccccgcaggcccgctcactttgctcacagctcctctgcaaggaccctgccgaacgcctggggtgtcgtgggggcagtgcccgcgaggtgaaggagcaccccctctttaagaagctgaacttcaagcggctgggagctggcatgctggagccgccgttcaagcctgacccccaggccatttactgcaaggatgttctggacattgaacagttctctacggtcaagggcgtggagctggagcctaccgaccaggacttctaccagaagtttgccacaggcagtgtgcccatcccctggcagaacgagatggtggagaccgagtgcttccaagagctgaatgtctttgggctggatggctcagttcccccagacctggactggaagggccagccacctgcacctcctaaaaagggactgctgcagagactcttcagtcgccaagattgctgtggaaactgcagcgacagcgaggaagagctccccacccgcctctagcccccagcccgaggcccccaccagcagttggcggtagcagctactccgagcgccgtttacagttttgcacagtgatcttccccattgtccactcaagtcgtggcctggggaacacagacggagctgtccccagtgtcctccgtccctcagcccctggcctggctgagtttggcagggcctgggccatccctgggacaaaggtgcgtcccttcagctcttctccgtggagctcggggctttctgtatttatgtatttgtacgaatgtatatagcgaccagagcattcttaattcccgccgcagacctggcgcccccgccttggctcctgggggcagccagccctggctggagagcgggacgtggcagaggagccactgccaaactcaaggctcctctggcccagcttggatggctgagggtggtcacacctgagccttcagcactgtgctgccaccccggcctctgagtaagactcgtgcctccccctgctgccctgggctcaggctgctacctctggggcccaaagctgtcccttctcagtgcttgtcagcgctgggtctggggcctctgtatgccctaggcctgtgccaaagtggccagagattgggctgcctgtgatacccatcagcccactgccccggccggcccagataggtctgcctctgccttccagctcccacagcctggtccctgatactgggctctgtcctgcagacacctctttcagaaacgcccaagcccagccctaggagggggtggggcatccctggtcaaccctcaaacattccggactcccctcataacaatagacacatgtgcccagcaataatccgccccttcctgtgtgcgcctgtggggtgcgtgctctctgtgtgtacctgtgtgggtgaaggggatagggcgaggctgtgcctgtgccccaggtcccagccctggcccttcccagactgtgatggccatcctggtcccagtgttagggtagcatgggattacagggccctgttttttccatatttaaagccaatttttattactcgttttgtccaacgtaaaag

SEQ ID NO: 143 - DNA, 3175 bp, Homo sapiens
cagatcgggaagaaaaatatggaatgtgttttaccgctgactgaacacaaccaaatgaactgtcctgacagtagtttgcaaaccagcagctagcagtttgtccagcctctaacattgtccagcactttccagagcaaactcactgtttacaagaactcttggccttacgaagtttataacctcaagctttgtttatttaaaatattcctgcaaaagaaaagtacccggcacccactttccaaaatggccatggatgagtatttgtggatggtcattttgggtttcatcatagctttcatcttggccttttctgttggtgcaaacgatgttgccaactcctttggtacagccgtgggctctggtgtggtgaccttgaggcaggcatgcattttagcttcaatatttgaaaccaccggctccgtgttactaggcgccaaagtaggagaaaccattcgcaaaggtatcattgacgtgaacctgtacaacgagacggtggagactctcatggctggggaagttagtgccatggttggttccgctgtgtggcagctgattgcttccttcctgaggcttccaatctcaggaacgcactgcattgtgggttctactataggattctcactggtcgcaatcggtaccaaaggtgtgcagtggatggagcttgtcaagattgttgcttcttggtttatatctccactgttgtctggtttcatgtctggcctgctgtttgtactcatcagaattttcatcttaaaaaaggaagaccctgttcccaatggcctccgggcactcccagtattctatgctgctaccatagcaatcaatgtcttttccatcatgtacacaggagcaccagtgctcggccttgttctccccatgtgggccatagccctcatttcctttggtgtcgccctcctgttcgctttttttgtgtggctcttcgtgtgtccgtggatgcggaggaaaataacaggcaaattacaaaaagaaggtgctttatcacgagtatctgacgaaagcctcagtaaggttcaggaagcagagtccccagtatttaaagagctaccaggtgccaaggctaatgatgacagcaccatcccgctcacgggagcagcaggggagacactggggacctcggaaggcacttctgcgggcagccaccctcgggctgcatacggaagagcactgtccatgacccatggctctgtgaaatcgcccatctccaacggcaccttcggcttcgacggccacaccaggagcgacggtcatgtgtaccacaccgtgcacaaagactcggggctctacaaagatctgctgcacaaaatccacatcgacaggggccccgaggagaagccagcccaggaaagcaactaccggctgctccgccgaaacaacagttacacctgctacaccgcagccatttgtgggctgccagtgcacgccacctttcgagctgcggactcatcggccccagaggacagtgagaagctggtgggcgacaccgtgtcctactccaagaagaggctgcgctacgacagctactcgagctactgtaacgcggtggcagaggcggagatcgaggcggaggagggcggcgtggagatgaagctggcgtcggagctggccgaccctgaccagccgcgagaggaccctgcagaggaggagaaggaggagaaggacgcacccgaggttcacctcctgttccatttcctgcaggtcctcaccgcctgtttcgggtcctttgctcacggcggcaatgacgtgagtaatgccatcggtcccctggtagccttgtggctgatttacaaacaaggcggggtaacgcaagaagcagctacacccgtctggctgctgttttatggaggagttggaatctgcacaggcctctgggtctgggggagaagagtgatccagaccatggggaaggacctcactcccatcacgccgtccagcggcttcacgatcgagctggcctcagccttcacagtggtgatcgcctccaacatcgggcttccagtcagcaccacgcactgtaaggtgggctcggtggtggccgtgggctggatccgctcccgcaaggctgtggactggcgcctctttcggaacatcttcgtggcctggttcgtgaccgtccctgtggctgggctgttcagcgctgctgtcatggctcttctcatgtatgggatccttccatatgtgtgatttgtcttcttccagctgcaaacagctaaagggatggtctggtgttggcgtgtgggagacatgtgtgctcgtgccgcacatacacatcctggccgtgcacggctctctcatgaccagctctctgcctcccttccaggaggctccatcccacactgttcacccaggctgcggagactcaccttcccgagctaacttaactactgtacataataatatgtattaaactggtatcgtggtgatataatgtggtgcagttacttatatattaaatatctattgtatccatagaataggcagcattatttcaaacatattcaagttgggagtggagatcattgcctagaagtcaatattcaataaatcttgtacataactatttcgatggcaaatgttaagccttctaaaaggaaagtgtagattggaaaatgattttttttccaaatgatgtttttgccttctaatatactgtaaggtaatgagcttcagaacaggcaacctgaccctgcagaggtcgcgtgctgtgggatgacagcgggacgggagctcacaagtgctttcactgaagatttgttcatatactgtgtattgattgttgtgtaatatatcatcattgcttttgtaaatacgtaaaactgtaattttttaatggtgtgcttcccttatactttttgatcagagaattttggaaagtaccaaagaagcaggggaatcattggccagtgttacgttttcacattgtctgtctcccaccctcactgatcacgcctgccccagagcagtgtgtggcggtgacaccgtcacccagcatgcgccacgccgtcgtcccaccagcagtgccaccgccaccacaccccagatcccacccaccttgcagtggctttcttgtcatcagagtagagaatgcacaggtgttggtgagggcgtgtggctgagcactacatgtcaagtcagagtcagtttctatccaattctc

SEQ ID NO: 144 - DNA, 5433 bp, Homo sapiens
atgggatggctgtggatctttggggcagccctggggcagtgtctgggctacagttcacagcagcaaagggtgccatttcttcagcctcccggtcaaagtcaactgcaagcgagttatgtggagtttagacccagccagggttgtagccctggatactatcgggatcataaaggcttgtataccggacggtgtgttccctgcaattgcaacggacattcaaatcaatgccaggatggctcaggcatatgtgttaactgtcagcacaacaccgcgggagagcactgtgaacgctgccaggagggctactatggcaacgccgtccacggatcctgcagggcctgcccatgtcctcacactaacagctttgccactggctgtgtggtgaatgggggagacgtgcggtgctcctgcaaagctgggtacacaggaacacagtgtgaaaggtgtgcaccgggatatttcgggaatccccagaaattcggaggtagctgccaaccatgcagttgtaacagcaatggccagctgggcagctgtcatcccctgactggagactgcataaaccaagaacccaaagatagcagccctgcagaagaatgtgatgattgcgacagctgtgtgatgaccctcctgaacgacctggccaccatgggcgagcagctccgcctggtcaagtctcagctgcagggcctgagtgccagcgcagggcttctggagcagatgaggcacatggagacccaggccaaggacctgaggaatcagttgctcaactaccgttctgccatttcaaatcatggatcaaaaatagaaggcctggaaagagaactgactgatttgaatcaagaatttgagactttgcaagaaaaggctcaagtaaattccagaaaagcacaaacattaaacaacaatgttaatcgggcaacacaaagcgcaaaagaactggatgtgaagattaaaaatgtcatccggaatgtgcacattcttttaaagcagatctctgggacagatggagagggaaacaacgtgccttcaggtgacttttccagagagtgggctgaagcccagcgcatgatgagggaactgcggaacaggaactttggaaagcacctcagagaagcagaagctgataaaagggagtcgcagctcttgctgaaccggataaggacctggcagaaaacccaccagggggagaacaatgggcttgctaacagtatccgggattctttaaatgaatacgaagccaaactcagtgaccttcgtgctcggctgcaggaggcagctgcccaagccaagcaggcaaatggcttgaaccaagaaaacgagagagctttgggagccattcagagacaagtgaaagaaataaattccctgcagagtgatttcaccaagtatctaaccactgcagactcatctttgttgcaaaccaacattgcgctgcagctgatggagaaaagccagaaggaatatgaaaaattagctgccagtttaaatgaagcaagacaagaactaagtgacaaagtaagagaactttccagatctgctggcaaaacatcccttgtggaggaggcagaaaagcacgcgcggtccttacaagagctggcaaagcagctggaagagatcaagagaaacgccagcggggatgagctggtgcgctgtgctgtggatgccgccaccgcctacgagaacatcctcaatgccatcaaagcggccgaggacgcagccaacagggctgccagtgcatctgaatctgccctccagacagtgataaaggaagatctgccaagaaaagctaaaaccctgagttccaacagtgataaactgttaaatgaagccaagatgacacaaaagaagctaaagcaagaagtcagtccagctctcaacaacctacagcaaaccctgaatattgtgacagttcagaaagaagtgatagacaccaatctcacaactctccgagatggtcttcatgggatacagagaggtgatattgatgctatgatcagtagtgcaaagagcatggtcagaaaggccaacgacatcacagatgaggttctggatgggctcaaccccatccagacagatgtggaaagaattaaggacacctatgggaggacacagaacgaagacttcaaaaaggctctgactgatgcagataactcggtgaataagttaaccaacaaactacctgatctttggcgcaagattgaaagtatcaaccaacagctgttgcccttgggaaacatctctgacaacatggacagaatacgagaactaattcagcaggccagagatgctgccagtaaggttgctgtccccatgaggttcaatggtaaatctggagtcgaagtccgactgccaaatgacctggaagatttgaaaggatatacatctctgtccttgtttctccaaaggcccaactcaagagaaaatgggggtactgagaatatgtttgtgatgtaccttggaaataaagatgcctcccgggactacatcggcatggcagttgtggatggccagctcacctgtgtctacaacctgggggaccgtgaggctgaactccaagtggaccagatcttgaccaagagtgagactaaggaggcagttatggatcgggtgaaatttcagagaatttatcagtttgcaaggcttaattacaccaaaggagccacatccagtaaaccagaaacacccggagtctatgacatggatggtagaaatagcaatacactccttaatttggatcctgaaaatgttgtattttatgttggaggttacccacctgattttaaacttcccagtcgactaagtttccctccatacaaaggttgtattgaattagatgacctcaatgaaaatgttctgagcttgtacaacttcaaaaaaacattcaatctcaacacaactgaagtggagccttgtagaaggaggaaggaagagtcagacaaaaattattttgaaggtacgggctatgctcgagttccaactcaaccacatgctcccatcccaacctttggacagacaattcagaccaccgtggatagaggcttgctgttctttgcagaaaacggggatcgcttcatatctctaaatatagaagatggcaagctcatggtgagatacaaactgaattcagagctaccaaaagagagaggagttggagacgccataaacaacggcagagaccattcgattcagatcaaaattggaaaactccaaaagcgtatgtggataaatgtggacgttcaaaacactataattgatggtgaagtatttgatttcagcacatattatctgggaggaattccaattgcaatcagggaaagatttaacatttctacgcctgctttccgaggctgcatgaaaaatttgaagaaaaccagtggtgtcgttagattgaatgatactgtgggagtaaccaaaaagtgctcggaagactggaagcttgtgcgatctgcctcattctccagaggaggacaattgagtttcactgatttgggcttaccacctactgaccacctccaggcctcatttggatttcagacctttcaacccagtggcatattattagatcatcagacatggacaaggaacctgcaggtcactctggaagatggttacattgaattgagcaccagcgatagcggcggcccaatttttaaatctccacagacgtatatggatggtttactgcattatgtatctgtaataagcgacaactctggactacggcttctcatcgatgaccagcttctgagaaatagcaaaaggctaaaacacatttcaagttcccggcagtctctgcgtctgggcgggagcaattttgagggttgtattagcaatgtttttgtccagaggttatcactgagtcctgaagtcctagatttgaccagtaactctctcaagagagatgtgtccctgggaggctgcagtttaaacaaaccaccttttctaatgttgcttaaaggttctaccaggtttaacaagaccaagacttttcgtatcaaccagctgttgcaggacacaccagtggcctccccaaggagcgtgaaggtgtggcaagatgcttgctcaccacttcccaagacccaggccaatcatggagccctccagtttggggacattcccaccagccacttgctattcaagcttcctcaggagctgctgaaacccaggtcacagtttgctgtggacatgcagacaacatcctccagaggactggtgtttcacacgggcactaagaactcctttatggctctttatctttcaaaaggacgtctggtctttgcactggggacagatgggaaaaaattgaggatcaaaagcaaggagaaatgcaatgatgggaaatggcacacggtggtgtttggccatgatggggaaaaggggcgcttggttgtggatggactgagggcccgggagggaagtttgcctggaaactccaccatcagcatcagagcgccagtttacctgggatcacctccatcagggaaaccaaagagcctccccacaaacagctttgtgggatgcctgaagaactttcagctggattcaaaacccttgtataccccttcttcaagcttcggggtgtcttcctgcttgggtggtcctttggagaaaggcatttatttctctgaagaaggaggtcatgtcgtcttggctcactctgtattgttggggccagaatttaagcttgttttcagcatccgcccaagaagtctcactgggatcctaatacacatcggaagtcagcccgggaagcacttatgtgtttacctggaggcaggaaaggtcacggcctctatggacagtggggcaggtgggacctcaacgtcggtcacaccaaagcagtctctgtgtgatggacagtggcactcggtggcagtcaccataaaacaacacatcctgcacctggaactggacacagacagtagctacacagctggacagatccccttcccacctgccagcactcaagagccactacaccttggaggtgctccagccaatttgacgacactgaggatccctgtgtggaaatcattctttggctgtctgaggaatattcatgtcaatcacatccctgtccctgtcactgaagccttggaagtccaggggcctgtcagtctgaatggttgtcctgaccagtaacccaagcctatttcacagcaaggaaattcaccttcaaaagcactgattacccaatgcacctccctccccagctcgagatcattcttcaattaggacacaaaccagacaggtttaatagcgaatctaattttgaattctgaccatggatacccatcactttggcattcagtgctacatgtgtattttatataaaaatcccatttcttgaagataaaaaaattgttattcaaattgttatgcacagaatgtttttggtaatattaatttccactaaaaaattaaatgtctttt

SEQ ID NO: 145 - DNA, 3231 bp, Homo sapiens
cgtgaaggcaaagagaacacgctgcaaaaggcttccaagaatcctcgacatggcaaggaggagctcgttccagtcgtgtcagataatatccctgttcacttttgccgttggagtcagtatctgcttaggattcactgcacatcgaattaagagagcagaaggatgggaggaaggtcctcctacagtgctatcagactccccctggaccaacatctccggatcttgcaagggcaggtgctttgaacttcaagaggctggacctcctgattgtcgctgtgacaacttgtgtaagagctataccagttgctgccatgactttgatgagctgtgtttgaagacagcccgtggctgggagtgtactaaggacagatgtggagaagtcagaaatgaagaaaatgcctgtcactgctcagaggactgcttggccaggggagactgctgtaccaattaccaagtggtttgcaaaggagagtcgcattgggttgatgatgactgtgaggaaataaaggccgcagaatgccctgcagggtttgttcgccctccattaatcatcttctccgtggatggcttccgtgcatcatacatgaagaaaggcagcaaagtcatgcctaatattgaaaaactaaggtcttgtggcacacactctccctacatgaggccggtgtacccaactaaaacctttcctaacttatacactttggccactgggctatatccagaatcacatggaattgttggcaattcaatgtatgatcctgtatttgatgccacttttcatctgcgagggcgagagaaatttaatcatagatggtggggaggtcaaccgctatggattacagccaccaagcaaggggtgaaagctggaacattcttttggtctgttgtcatccctcacgagcggagaatattaaccatattgcggtggctcaccctgccagatcatgagaggccttcggtctatgccttctattctgagcaacctgatttctctggacacaaatatggccctttcggccctgaggagagtagttatggctcaccttttactccggctaagagacctaagaggaaagttgcccctaagaggagacaggaaagaccagttgctcctccaaagaaaagaagaagaaaaatacataggatggatcattatgctgcggaaactcgtcaggacaaaatgacaaatcctctgagggaaatcgacaaaattgtggggcaattaatggatggactgaaacaactaaaactgcgtcggtgtgtcaacgtcatctttgtcggagaccatggaatggaagatgtcacatgtgatagaactgagttcttgagtaattacctaactaatgtggatgatattactttagtgcctggaactctaggaagaattcgatccaaatttagcaacaatgctaaatatgaccccaaagccattattgccaatctcacgtgtaaaaaaccagatcagcactttaagccttacttgaaacagcaccttcccaaacgtttgcactatgccaacaacagaagaattgaggatatccatttattggtggaacgcagatggcatgttgcaaggaaacctttggatgtttataagaaaccatcaggaaaatgctttttccagggagaccacggatttgataacaaggtcaacagcatgcagactgtttttgtaggttatggcccaacatttaagtacaagactaaagtgcctccatttgaaaacattgaactttacaatgttatgtgtgatctcctgggattgaagccagctcctaataatgggacccatggaagtttgaatcatctcctgcgcactaataccttcaggccaaccatgccagaggaagttaccagacccaattatccagggattatgtaccttcagtctgattttgacctgggctgcacttgtgatgataaggtagagccaaagaacaagttggatgaactcaacaaacggcttcatacaaaagggtctacagaagagagacacctcctctatgggcgacctgcagtgctttatcggactagatatgatatcttatatcacactgactttgaaagtggttatagtgaaatattcctaatgctactctggacatcatatactgtttccaaacaggctgaggtttccagcgttcctgaccatctgaccagttgcgtccggcctgatgtccgtgtttctccgagtttcagtcagaactgtttggcctacaaaaatgataagcagatgtcctacggattcctctttcctccttatctgagctcttcaccagaggctaaatatgatgcattccttgtaaccaatatggttccaatgtatcctgctttcaaacgggtctggaattatttccaaagggtattggtgaagaaatatgcttcggaaagaaatggagttaacgtgataagtggaccaatcttcgactatgactatgatggcttacatgacacagaagacaaaataaaacagtacgtggaaggcagttccattcctgttccaactcactactacagcatcatcaccagctgtctggatttcactcagcctgccgacaagtgtgacggccctctctctgtgtcctccttcatcctgcctcaccggcctgacaacgaggagagctgcaatagctcagaggacgaatcaaaatgggtagaagaactcatgaagatgcacacagctagggtgcgtgacattgaacatctcaccagcctggacttcttccgaaagaccagccgcagctacccagaaatcctgacactcaagacatacctgcatacatatgagagcgagatttaactttctgagcatctgcagtacagtcttatcaactggttgtatatttttatattgtttttgtatttattaatttgaaaccaggacattaaaaatgttagtattttaatcctgtaccaaatctgacatattatgcctgaatgactccactgtttttctctaatgcttgatttaggtagccttgtgttctgagtagagcttgtaataaatactgcagcttgagaaaaagtggaagcttctaaatggtgctgcagatttgatatttgcattgaggaaatattaattttccaatgcacagttgccacatttagtcctgtactgtatggaaacactgattttgtaaagttgcctttatttgctgttaactgttaactatgacagatatatttaagccttataaaccaatcttaaacataataaatcacacattcagtttt

SEQ ID NO: 146 - DNA, 500 bp, Homo sapiens
tgccgctgcagcagcgcagttccagtccgttgctttactttttgcttcaccgacatagtcattatgccgaagagaaagtctccagagaatacagagggcaaagatggatccaaagtaactaaacaggagcccacaagacggtctgccagattgtcagcgaaacctgctccaccaaaacctgaacccaaaccaagaaaaacatctgctaagaaagaacctggagcaaagattagcagaggtgctaaagggaagaaggaggaaaagcaggaagctggaaaggaaggtactgcaccatctgaaaatggtgaaactaaagctgaagaggcacagaaaactgaatctgtagataacgagggagaatgaattgtcatgaaaaattggggttgattttatgtatctcttgggacaacttttaaaagctatttttaccaagtattttgtaaatgctaattttttaggactctactagttggcatacgaaaatatataaggatggacat

SEQ ID NO: 147 - DNA, 4788 bp, Homo sapiens
tttttagaaaaaaaaaatatatttccctcctgctccttctgcgttcacaagctaagttgtttatctcggctgcggcgggaactgcggacggtggcgggcgagcggctcctctgccagagttgatattcactgatggactccaaagaatcattaactcctggtagagaagaaaaccccagcagtgtgcttgctcaggagaggggagatgtgatggacttctataaaaccctaagaggaggagctactgtgaaggtttctgcgtcttcaccctcactggctgtcgcttctcaatcagactccaagcagcgaagacttttggttgattttccaaaaggctcagtaagcaatgcgcagcagccagatctgtccaaagcagtttcactctcaatgggactgtatatgggagagacagaaacaaaagtgatgggaaatgacctgggattcccacagcagggccaaatcagcctttcctcgggggaaacagacttaaagcttttggaagaaagcattgcaaacctcaataggtcgaccagtgttccagagaaccccaagagttcagcatccactgctgtgtctgctgcccccacagagaaggagtttccaaaaactcactctgatgtatcttcagaacagcaacatttgaagggccagactggcaccaacggtggcaatgtgaaattgtataccacagaccaaagcacctttgacattttgcaggatttggagttttcttctgggtccccaggtaaagagacgaatgagagtccttggagatcagacctgttgatagatgaaaactgtttgctttctcctctggcgggagaagacgattcattccttttggaaggaaactcgaatgaggactgcaagcctctcattttaccggacactaaacccaaaattaaggataatggagatctggttttgtcaagccccagtaatgtaacactgccccaagtgaaaacagaaaaagaagatttcatcgaactctgcacccctggggtaattaagcaagagaaactgggcacagtttactgtcaggcaagctttcctggagcaaatataattggtaataaaatgtctgccatttctgttcatggtgtgagtacctctggaggacagatgtaccactatgacatgaatacagcatccctttctcaacagcaggatcagaagcctatttttaatgtcattccaccaattcccgttggttccgaaaattggaataggtgccaaggatctggagatgacaacttgacttctctggggactctgaacttccctggtcgaacagttttttctaatggctattcaagccccagcatgagaccagatgtaagctctcctccatccagctcctcaacagcaacaacaggaccacctcccaaactctgcctggtgtgctctgatgaagcttcaggatgtcattatggagtcttaacttgtggaagctgtaaagttttcttcaaaagagcagtggaaggacagcacaattacctatgtgctggaaggaatgattgcatcatcgataaaattcgaagaaaaaactgcccagcatgccgctatcgaaaatgtcttcaggctggaatgaacctggaagctcgaaaaacaaagaaaaaaataaaaggaattcagcaggccactacaggagtctcacaagaaacctctgaaaatcctggtaacaaaacaatagttcctgcaacgttaccacaactcacccctaccctggtgtcactgttggaggttattgaacctgaagtgttatatgcaggatatgatagctctgttccagactcaacttggaggatcatgactacgctcaacatgttaggagggcggcaagtgattgcagcagtgaaatgggcaaaggcaataccaggtttcaggaacttacacctggatgaccaaatgaccctactgcagtactcctggatgtttcttatggcatttgctctggggtggagatcatatagacaatcaagtgcaaacctgctgtgttttgctcctgatctgattattaatgagcagagaatgactctaccctgcatgtacgaccaatgtaaacacatgctgtatgtttcctctgagttacacaggcttcaggtatcttatgaagagtatctctgtatgaaaaccttactgcttctctcttcagttcctaaggacggtctgaagagccaagagctatttgatgaaattagaatgacctacatcaaagagctaggaaaagccattgtcaagagggaaggaaactccagccagaactggcagcggttttatcaactgacaaaactcttggattctatgcatgaagtggttgaaaatctccttaactattgcttccaaacatttttggataagaccatgagtattgaattccccgagatgttagctgaaatcatcaccaatcagataccaaaatattcaaatggaaatatcaaaaaacttctgtttcatcaaaagtgactgccttaataagaatggttgccttaaagaaagtcgaattaatagcttttattgtataaactatcagtttgtcctgtagaggttttgttgttttattttttattgttttcatctgttgttttgttttaaatacgcactacatgtggtttatagagggccaagacttggcaacagaagcagttgagtcgtcatcacttttcagtgatgggagagtagatggtgaaatttattagttaatatatcccagaaattagaaaccttaatatgtggacgtaatctccacagtcaaagaaggatggcacctaaaccaccagtgcccaaagtctgtgtgatgaactttctcttcatactttttttcacagttggctggatgaaattttctagactttctgttggtgtatcccccccctgtatagttaggatagcatttttgatttatgcatggaaacctgaaaaaaagtttacaagtgtatatcagaaaagggaagttgtgccttttatagctattactgtctggttttaacaatttcctttatatttagtgaactacgcttgctcattttttcttacataattttttattcaagttattgtacagctgtttaagatgggcagctagttcgtagctttcccaaataaactctaaacattaatcaatcatctgtgtgaaaatgggttggtgcttctaacctgatggcacttagctatcagaagaccacaaaaattgactcaaatctccagtattcttgtcaaaaaaaaaaaaaaaaaagctcatattttgtatatatctgcttcagtggagaattatataggttgtgcaaattaacagtcctaactggtatagagcacctagtccagtgacctgctgggtaaactgtggatgatggttgcaaaagactaatttaaaaaataactaccaagaggccctgtctgtacctaacgccctatttttgcaatggctatatggcaagaaagctggtaaactatttgtctttcaggaccttttgaagtagtttgtataacttcttaaaagttgtgattccagataaccagctgtaacacagctgagagacttttaatcagacaaagtaattcctctcactaaactttacccaaaaactaaatctctaatatggcaaaaatggctagacacccattttcacattcccatctgtcaccaattggttaatctttcctgatggtacaggaaagctcagctactgatttttgtgatttagaactgtatgtcagacatccatgtttgtaaaactacacatccctaatgtgtgccatagagtttaacacaagtcctgtgaatttcttcactgttgaaaattattttaaacaaaatagaagctgtagtagccctttctgtgtgcaccttaccaactttctgtaaactcaaaacttaacatatttactaagccacaagaaatttgatttctattcaaggtggccaaattatttgtgtaatagaaaactgaaaatctaatattaaaaatatggaacttctaatatatttttatatttagttatagtttcagatatatatcatattggtattcactaatctgggaagggaagggctactgcagctttacatgcaatttattaaaatgattgtaaaatagcttgtatagtgtaaaataagaatgatttttagatgagattgttttatcatgacatgttatatattttttgtaggggtcaaagaaatgctgatggataacctatatgatttatagtttgtacatgcattcatacaggcagcgatggtctcagaaaccaaacagtttgctctaggggaagagggagatggagactggtcctgtgtgcagtgaaggttgctgaggctctgacccagtgagattacagaggaagttatcctctgcctcccattctgaccacccttctcattccaacagtgagtctgtcagcgcaggtttagtttactcaatctccccttgcactaaagtatgtaaagtatgtaaacaggagacaggaaggtggtgcttacatccttaaaggcaccatctaatagcgggttactttcacatacagccctcccccagcagttgaatgacaacagaagcttcagaagtttggcaatagtttgcatagaggtaccagcaatatgtaaatagtgcagaatctcataggttgccaataatacactaattcctttctatcctacaacaagagtttatttccaaataaaatgaggacatgtttttgttttctttgaatgctttttgaatgttatttgttattttcagtattttggagaaattatttaataaaaaaacaatcatttgctttttg

SEQ ID NO: 148 - DNA, 4788 bp, Homo sapiens; identical to SEQ ID NO: 147

SEQ ID NO: 149 - DNA, 539 bp, Homo sapiens
cgagttccccgaggtgtacgtgcccaccgtcttcgagaactatgtggccgacattgaggtggacggcaagcaggtggagctggcgctgtgggacacggcgggccaggaggactacgaccgcctgcggccgctctcctacccggacaccgacgtcattctcatgtgcttctcggtggacagcccggactcgctggagaacatccccgagaagtgggtccccgaggtgaagcacttctgtcccaatgtgcccatcatcctggtggccaacaaaaaagacctgcgcagcgacgagcatgtccgcacagagctggcccgcatgaagcaggaacccgtgcgcacggatgacggccgcgccatggccgtgcgcatccaagcctacgactacctcgagtgctctgccaagaccaaggaaggcgtgcgcgaggtcttcgagacggccacgcgcgccgcgctgcagaagcgctacggctcccagaacggctgcatcaactgctgcaaggtgctatgagggccgcgccgtcgcgcctgcccctgccggc

SEQ ID NO: 150 - DNA, 5749 bp, Homo sapiens
cgcgggagccaacttcaggctgctcagaggaagcccgtgcagtcagtcacctgggtgcaagagcgttgctgcctcgggctctcccgctgcagggagagcggcactcgctggcctggatgtggttggatttaggggggctccgcagcaggggtttcgtggcggtggcaagcgctgcaacaggtagacggcgagagacggaccccggccgaggcagggatggagaccaaaggctaccacagtctccctgaaggtctagatatggaaagacggtggggtcaagtttctcaggctgtggagcgttcttccctgggacctacagagaggaccgatgagaataactacatggagattgtcaacgtaagctgtgtttccggtgctattccaaacaacagtactcaaggaagcagcaaagaaaaacaagaactactcccttgccttcagcaagacaataatcggcctgggattttaacatctgatattaaaactgagctggaatctaaggaactttcagcaactgtagctgagtccatgggtttatatatggattctgtaagagatgctgactattcctatgagcagcagaaccaacaaggaagcatgagtccagctaagatttatcagaatgttgaacagctggtgaaattttacaaaggaaatggccatcgtccttccactctaagttgtgtgaacacgcccttgagatcatttatgtctgactctgggagctccgtgaatggtggcgtcatgcgcgccattgttaaaagccctatcatgtgtcatgagaaaagcccgtctgtttgcagccctctgaacatgacatcttcggtttgcagccctgctggaatcaactctgtgtcctccaccacagccagctttggcagttttccagtgcacagcccaatcacccagggaactcctctgacatgctcccctaatgctgaaaatcgaggctccaggtcgcacagccctgcacatgctagcaatgtgggctctcctctctcaagtccgttaagtagcatgaaatcctcaatttccagccctccaagtcactgcagtgtaaaatctccagtctccagtcccaataatgtcactctgagatcctctgtgtctagccctgcaaatattaacaactcaaggtgctctgtttccagcccttcgaacactaataacagatccacgctttccagtccggcagccagtactgtgggatctatctgtagccctgtaaacaatgccttcagctacactgcttctggcacctctgctggatccagtacattgcgggatgtggttcccagtccagacacgcaggagaaaggtgctcaagaggtcccttttcctaagactgaggaagtagagagtgccatctcaaatggtgtgactggccagcttaatattgtccagtacataaaaccagaaccagatggagcttttagcagctcatgtctaggaggaaatagcaaaataaattcggattcttcattctcagtaccaataaagcaagaatcaaccaagcattcatgttcaggcacctcttttaaagggaatccaacagtaaacccgtttccatttatggatggctcgtatttttcctttatggatgataaagactattattccctatcaggaattttaggaccacctgtgcccggctttgatggtaactgtgaaggcagcggattcccagtgggtattaaacaagaaccagatgacgggagctattacccagaggccagcatcccttcctctgctattgttggggtgaattcaggtggacagtccttccactacaggattggtgctcaaggtacaatatctttatcacgatcggctagagaccaatctttccaacacctgagttcctttcctcctgtcaatactttagtggagtcatggaaatcacacggcgacctgtcgtctagaagaagtgatgggtatccggtcttagaatacattccagaaaatgtatcaagctctactttacgaagtgtttctactggatcttcaagaccttcaaaaatatgtttggtgtgtggggatgaggcttcaggatgccattatggggtagtcacctgtggcagctgcaaagttttcttcaaaagagcagtggaagggcaacacaactatttatgtgctggaagaaatgattgcatcattgataagattcgacgaaagaattgtcctgcttgcagacttcagaaatgtcttcaagctggaatgaatttaggagcacgaaagtcaaagaagttgggaaagttaaaagggattcacgaggagcagccacagcagcagcagcccccacccccacccccacccccgcaaagcccagaggaagggacaacgtacatcgctcctgcaaaagaaccctcggtcaacacagcactggttcctcagctctccacaatctcacgagcgctcacaccttcccccgttatggtccttgaaaacattgaacctgaaattgtatatgcaggctatgacagctcaaaaccagatacagccgaaaatctgctctccacgctcaaccgcttagcaggcaaacagatgatccaagtcgtgaagtgggcaaaggtacttccaggatttaaaaacttgcctcttgaggaccaaattaccctaatccagtattcttggatgtgtctatcatcatttgccttgagctggagatcgtacaaacatacgaacagccaatttctctattttgcaccagacctagtctttaatgaagagaagatgcatcagtctgccatgtatgaactatgccaggggatgcaccaaatcagccttcagttcgttcgactgcagctcacctttgaagaatacaccatcatgaaagttttgctgctactaagcacaattccaaaggatggcctcaaaagccaggctgcatttgaagaaatgaggacaaattacatcaaagaactgaggaagatggtaactaagtgtcccaacaattctgggcagagctggcagaggttctaccaactgaccaagctgctggactccatgcatgacctggtgagcgacctgctggaattctgcttctacaccttccgagagtcccatgcgctgaaggtagagttccccgcaatgctggtggagatcatcagcgaccagctgcccaaggtggagtcggggaacgccaagccgctctacttccaccggaagtgactgcccgctgcccagaagaactttgccttaagtttccctgtgttgttccacacccagaaggacccaagaaaacctgtttttaacatgtgatggttgattcacacttgttcaacagtttctcaagtttaaagtcatgtcagaggtttggagccgggaaagctgtttttccgtggatttggcgagaccagagcagtctgaaggattccccacctccaatcccccagcgcttagaaacatgttcctgttcctcgggatgaaaagccatatctagtcaataactctgattttgatattttcacagatggaagaagttttaactatgccgtgtagtttctggtatcgttcgcttgttttaaaagggttcaaggactaacgaacgttttaaagcttacccttggtttgcacataaaacgtatagtcaatatggggcattaatattcttttgttattaaaaaaacacaaaaaaataataaaaaaatatatacagattcctgttgtgtaataacagaactcgtggcgtggggcagcagctgcctctgagccctcgctcgtccacggtcttctgcatcactggtatacacactcgttagcgtccatttcttatttaattagaatggataagatgatgttaaatgccttggtttgatttctagtatctattgtgttggctttacaaataattttttgcagtcttttgctgtgctgtacattactgtatgtataaattatgaaggacctgaaataaggtataaggatcttttgtaaatgagacacatacaaaaaaaatctttaatggttaataggatgaatgggaaagtatttttgaaagaattctattttgctggagactatttaagtactatctttgtctaaacaaggtaatttttttttgtaaagtgcaatgtcctgcatgcataatgaaccgtttacagtgtatttaagaaagggaaagctgtgccttttttagcttcatatctaatttaccattattttacagtctctgttgtaaataaccacactgaaacctcttcggttgtcttgaaacctttctactttttctgtactttttgttttgttcttggtctcccgcttggggcatttgtgggactccagcacgttttctggcttctgcttcatcctgctccatcggggaatgacacactgcggtgtctgcagctcctggaaggtgtcatttgacaacacatgtgggagaggaggtccttggagtgctgcagctttgggaaagcctgcctcgtttcccttttcctctagaagcagaaccagctctacgagagtgagactgggaacttgatggctcagagagcatcttttcctcccattttagaaaatcagattttctcctgtgggaaaaaaaaattccatgcactctctctctgttaaagatcagctattcccttctgatcttggaaagaggttctgcactcctggaaccggtcacaggaacgcacagatcatggcaggatgcgctgggacggcccatcttggcaaggttcagtctgaatggcatggagaccgggagatagaggggttttagatttttaaaaggtaggttttaaaaataagttttatacataaacagttttggagaaaaattacagatcatataagcaagacagtggcactaaaatgtttaattcattaatctgtttgtttggcactgatgcaatgtatggcttttctcttgccccaaatcacaaacatatgtatctttggggaaactaacaatatgattgcactaaataaactactttgaatagaggccaaattaatcttttaaaaatgatgataatcatcaggtttactcagtgaaatcatattaattattttccaaaatctaaaagctgtagctggagaagcccatggccacgaggaagcagcaattaattagatcaacacttttctccagggttcaccatgcaggcaacattaccttgtctttcaaaagacacctgccttagtgcaaggggaaacctgtgaaagctgcactcagagggaggagtctttcttacataatttgcaatttcaggaatttaatttataggcagatctttaaatacagtcaacttacggtgcacagtaatatgaaagccacactttgaaggtaataaatacacagcatgcagactgggagttgctagcaaacaaatggcttacttacaaaagcagcttttagttcagacttagtttttataaaatgagaattctgacttacttaaccaggtttgggatggagatggtctgcatcagctttttgtattaacaaagttactggctctttgtgtgtctccaggtaactttgcttgattaaacagcaaagccatattctaaattcactgttgaatgcctgtcccagtccaaattgtctgtctgctcttatttttgtaccatattgctcttaaaaatcttggtttggtacagttcataattcaccaaaaagttcatataatttaaagaaacactaaattagtttaaaatgaagcaatttatatctttatgcaaaaacatatgtctgtctttgcaaaggactgtaagcagattacaataaatcctttacttt

SEQ ID NO: 151 - DNA, 1111 bp, Homo sapiens
ccgcgcgctcgccccgccgctcctgctgcagccccaggcccctcgccgccgccaccatggacgccatcaagaagaagatgcagatgctgaagctcgacaaggagaacgccttggatcgagctgagcaggcggaggccgacaagaaggcggcggaagacaggagcaagcagctggaagatgagctggtgtcactgcaaaagaaactcaagggcaccgaagatgaactggacaaatactctgaggctctcaaagatgcccaggagaagctggagctggcagagaaaaaggccaccgatgctgaagccgacgtagcttctctgaacagacgcatccagctggttgaggaagagttggatcgtgcccaggagcgtctggcaacagctttgcagaagctggaggaagctgagaaggcagcagatgagagtgagagaggcatgaaagtcattgagagtcgagcccaaaaagatgaagaaaaaatggaaattcaggagatccaactgaaagaggccaagcacattgctgaagatgccgaccgcaaatacgaagaggtggcccgtaagctggtcatcattgagagcgacctggaacgtgcagaggagcgggctgagctctcagaaggcaaatgtgccgagcttgaagaagaattgaaaactgtgacgaacaacttgaagtcactggaggctcaggctgagaagtactcgcagaaggaagacagatatgaggaagagatcaaggtcctttccgacaagctgaaggaggctgagactcgggctgagtttgcggagaggtcagtaactaaattggagaaaagcattgatgacttagaagacgagctgtacgctcagaaactgaagtacaaagccatcagcgaggagctggaccacgctctcaacgatatgacttccatataagtttctttgcttcacttctcccaagactccctcgtcgagctggatgtcccacctctctgagctctgcatttgtctattctccagctgaccctggttctctctcttagcatcctgccttagagccaggcacacactgtgctttctattgtacagaagctcttcgtttcagtgtcaaataaacactgtgtaagctaaaaaaa

SEQ ID NO: 152 - DNA, 1316 bp, Homo sapiens
gcttctgtctcctacagccacctgaagtccaaaaagggtcagtctacctcccgccataaaaaactcatgttcaagacagaagggcctgactcagactgacattctccacttcttgttccccactgacagcctccctcccccatctctccctcccctgccattttgggttttgggtctttgaacccttgcttgcaataggtgtgcgtcagaagcacccaggacttccatttgctttgtcccggggctccactgaacaagttggcctgcactggtgttttgttgtggggaggaggatggggagtaggacataccagcttagattttaaggtttttactgtgagggatgtttgggagatgtaagaaatgttcttgcagttaagggttagtttacaatcagccacattctaggtaggggcccacttcaccgtactaaccagggaagctgtccctcatgttgaattttctctaacttcaaggcccatatctgtgaaatgctggcatttgcacctacctcacagagtgcattgtgagggttaatgaaataatgtacatctggccttgaaaccaccttttattacatggggtctaaaacttgacccccttgagggtgcctgttccctctccctctccctgttggctggtgggttggtagtttctacagttgggcagctggttaggtagagggagttgtcaagtcttgctggcccagccaaaccctgtctgacaacctcttggtccaccttagtacctaaaaggaaatctcaccccatcccacaccctggaggatttcatctcttgtatatgatgatctggatccaccaagacttgttttatgctcagggtcaatttcttttttcttttttttttttttttttctttttctttgagactgggtctcgctttgttgcccaggctggagtggagtggcgtgatcttggcttactgcagcctttgcctccccggctcgagcagtcctgcctcagcctccggagtagctgggaccacaggttcatgccaccatggccagccaacttttgcatgttttgtagagatggggtctcacagtgttgcccaggctggtctcaaactcctgggctcaggcgatccacctgtctcagcctcccagagtgctgggattacaattgtgagccaccacgtccagctggaagggtcaacatcttttacattctgcaagcacatctgcattttcaccccacccttcccctccttctccctttttatatcccatttttatatcgatctcttattttacaataaaactttgctgccacctgtgtgtctgaggggtgaacgcc

SEQ ID NO: 153 - DNA, 3079 bp, Homo sapiens
gggccctacagagggtccgccatgttccccggcggcgccgccgcttggctctggtagccgccgcccccgcccccaaccccgcccggcccagagcctagccgagccccgggcccagcatggccgccccggagccggcccgggctgcaccgcccccacccccgcccccgccgccccctcccggggctgaccgcgtcgtcaaagctgtccctttccccccaacacatcgcttgacatctgaagaagtatttgatttggatgggatacccagggttgatgttctgaagaaccacttggtgaaagaaggtcgagtagatgaagaaattgcgcttagaattatcaatgagggtgctgccatccttcggagagagaaaaccatgatagaagtagaagctccaatcacagtgtgtggtgacatccatggccaattttttgatctgatgaaactttttgaagtaggaggatcacctgctaatacacgatacctttttcttggcgattatgtggacagaggttattttagtatagagtgtgtcttatatttatgggttctgaagattctatacccaagcacattatttcttctgagaggcaaccatgaatgcagacaccttactgaatattttacctttaagcaggaatgtaaaattaagtattcggaaagagtctatgaagcttgtatggaagcttttgatagtttgcctcttgctgcacttttaaaccaacagtttctttgtgttcatggtggactttcaccagaaatacacacactggatgatattaggagattagatagattcaaagagccacctgcatttggaccaatgtgtgacttgttatggtccgatccttctgaagattttggaaatgaaaaatcacaggaacattttagtcacaatacagttcgaggatgttcttatttttataactatccagcagtgtgtgaatttttgcaaaacaataatttgttatcgattattagagctcatgaagctcaagatgcaggctatagaatgtacagaaaaagtcaaactacagggttcccttcattaataacaattttttcggcacctaattacttagatgtctacaataataaagctgctgtattaaagtatgaaaataatgtgatgaatattcgacagtttaactgttctccacatccttactggttgcctaattttatggatgtcttcacgtggtctttaccgtttgttggagaaaaagtgacagaaatgttggtaaatgttctgagtatttgctctgatgatgaactaatgactgaaggtgaagaccagtttgatggttcagctgcagcccggaaagaaatcataagaaacaaaattcgagcaattggcaagatggcaagagtcttctctgttctcagggaggagagtgaaagtgtgctgacactcaagggcctgactcccacagggatgttgcctagtggagtgttagctggaggacggcagaccctgcaaagtgccacagttgaggctattgaggctgaaaaagcaatacgaggattctctccaccacatagaatctgcagttttgaagaggcaaagggtttggataggatcaatgagagaatgccacctcggaaagatgctgtacagcaagatggtttcaattctctgaacaccgcacatgccactgagaaccacgggacgggcaaccatactgcccagtgacccactacttcccagggactctcacatctcgggccccaaatggacagatcacccgaggagctggaggggtcggccaagctgactgtaaatttcacagtctctctgaagaaaccattgtgcttctgagaccctagcccccttcctggatggaggcttgagggccctgggacatgtgctatctgataagattgggtcatcgctgccaaggtggagagcagtgagcaaggggcttggggcaatttccagtggagggcatccacacctccattttatgcttgtggttcacacatttaagtttacaaatcagatttcttttccccttcagtagaattagattttgtttttcaatcatgatttcaaatgcaatcctaagagctaatgtggacttttctttttccatgaaatgtctttaaaggatgaattagcatggtcttaaaatacatttctgaggttactagctgtattttgaattgtgagcaaaatgccgagaaacccagttggcatttatacaaaatgttgacctcaggtctatagttcttaaatgtggctaattctgtaacatagtcttggtattttttaattatgaatgcatatcctatttccaggcaggctctcttacttgaacacaaatccaaaaactaatttagagtcttttttgcccagatcttttaagacttacaccccagagatttaagaagaaaacctctaaatttcaaaattatgaagaattacagaattactcatttaaggtactttaaaagaagtttgtacattgtcaaagtaaattttaattcaaatcatgtctgtaaaacttgacgtattttgtgtatgcatgttttcattttgcaaatatttaatatatagacctatgatgtacaggtacgacatgtataggttacctagatgttatgagaaattttagtttattgtgagtactcaagttgcttagagagccaccagggtgatttgctgctggctttctatcatttttatgttttaatgcaaaggaaattttaaaatgttctggaagtgtttttgattaagcaatgcagcctagaagcaatggttctgttcaatcattcagatgttagtggaagcataaaagtcaagactgcatgttgaaacctttcttttgatagttactgaactgcttggttaaactaaatggaaccatgtgctaatttttcacaattattgacctgtattgattgccactgtagtttggtatttccctttactttggtggcctgcttccctcatgccctggaatacaactcagagctccaggcagcggaaccatctattgttttgtttgccagaaagtgcaccctgtatggtctcctgtctaagttggaaatattatgcatgtgcaggactattcgagtatt

SEQ ID NO: 154 - DNA, 642 bp, Homo sapiens
atgcccggagccggccgcagcagcatggctcacgggcccggcgcgctgatgctcaagtgcgtggtggtcggcgacggggcggtgggcaagacgtgcctactcatgagctatgccaacgacgccttcccggaggagtacgtgcccaccgtcttcgaccactacgcagtcagcgtcaccgtggggggcaagcagtacctcctaggactctatgacacggccggacaggaagactatgaccgtctgaggcctttatcttacccaatgaccgatgtcttccttatatgcttctcggtggtaaatccagcctcatttcaaaatgtgaaagaggagtgggtaccggaacttaaggaatacgcaccaaatgtaccctttttattaataggaactcagattgatctccgagatgaccccaaaactttagcaagactgaatgatatgaaagaaaaacctatatgtgtggaacaaggacagaaactagcaaaagagataggagcatgctgctatgtggaatgttcagctttaacccagaagggattgaagactgtttttgatgaggctatcatagccattttaactccaaagaaacacactgtaaaaaaaagaataggatcaagatgtataaactgttgtttaattacgtga

SEQ ID NO: 155 - DNA, 1081 bp, Homo sapiens
gctgcccgtcctggcgagccgcgcctacgcggcccctgccccaggccaggccctgcagcgagtgggcatcgttgggggtcaggaggcccccaggagcaagtggccctggcaggtgagcctgagagtccgcgaccgatactggatgcacttctgcgggggctccctcatccacccccagtgggtgctgaccgcagcgcactgcgtgggaccggacgtcaaggatctggccgccctcagggtgcaactgcgggagcagcacctctactaccaggaccagctgctgccggtcagcaggatcatcgtgcacccacagttctacaccgcccagatcggagcggacatcgccctgctggagctggaggagccggtgaaggtctccagccacgtccacacggtcaccctgccccctgcctcagagaccttccccccggggatgccgtgctgggtcactggctggggcgatgtggacaatgatgagcgcctcccaccgccatttcctctgaagcaggtgaaggtccccataatggaaaaccacatttgtgacgcaaaataccaccttggcgcctacacgggagacgacgtccgcatcgtccgtgacgacatgctgtgtgccgggaacacccggagggactcatgccagggcgactccggagggcccctggtgtgcaaggtgaatggcacctggctgcaggcgggcgtggtcagctggggcgagggctgtgcccagcccaaccggcctggcatctacacccgtgtcacctactacttggactggatccaccactatgtccccaaaaagccgtgagtcaggcctggggtgtccacctgggtcactggaggaccagcccctcctgtccaaaacaccactgcttcctacccaggcggcgactgccccccacaccttccctgccccgtcctgagtgccccttcctgtcctaagccccctgctctcttctgagccccttcccctgtcctgaggacccttccccatcctgagcccccttccctgtcctaagcctgacgcctgcaccgggccctccggccctcccctgcccaggcagctggtggtgggcgctaatcc

SEQ ID NO: 156 - DNA, 1631 bp, Homo sapiens
tttaacacccatagtaggcctaaaagcagccaccaattaagaaagccacagcacgtacacccactccagggatctgccagcaccctgtggggcccagactacaggctgatggcggaggcttcgagtgacccgggtgctgaggagcgggaagagttgctggggcccactgctcagtggagcgtggaggacgaggaggaggccgtccacgagcaatgccagcatgagagagacaggcagcttcaggcccaggacgaggagggaggcggccatgtccccgagcggccgaagcaggagatgctcctcagcctgaagccctcggaggcccctgaactggatgaggacgagggctttggcgactggtcccagaggccagagcagcggcagcagcacgagggggcgcagggcgccttggacagcggagagcccccccagtgcaggagtcctgagggggagcaagaggacaggcccggcctgcatgcctacgaaaaggaggacagtgatgaagtccacctggaggagttgagtctgagcaaggaggggccaggcccagaggacactgtccaggacaacctgggggccgcaggggctgaggaggaacaggaggagcaccagaaatgtcagcagcccaggacacccagccccttggtcttggaggggaccatcgaacagagctcgcctcccctgagccctaccaccaaactcatcgacaggaccgagtccctaaaccgctccatagagaagagtaacagtgtgaagaaatcccagccagacttgcccatctccaagattgatcagtggctggaacaatacacccaggccatcgagaccgctggccggacccccaagctagcccgccaggcctccatagagctgcccagcatggctgtggccagtaccaagagtcggtgggagacgggtgaggtacaggctcagtctgcggccaagactccgtcctgcaaggatattgtggctggagacatgagcaagaaaagcctctgggagcagaagggaggctccaagacctcatcaacaattaagagcaccccatctgggaagaggtataagtttgtggccaccgggcatgggaagtatgagaaggtgcttgtggaagggggcccggctccctaggcgtcccatctcgcttcctgggtctgcaggtccagccggctggcaccctccatgtacccaggggagattccagccagacacccgccccccggccctggctaagaagttgcttcctgttgccagcatgacctaccctcgcctctttgatgccatccgctgccacctccttttgctcctggaccctttagcctctctgcccttccactctctgaccaccgcccccgccctccccacccagctccgcttcttgttacttgggggaggaaagaaactcctgatcattggccaaagggacttacccctggagaggccaagtgccttctaggaagttaggaggttgaggcacagcctgtgcagagagggtgggtcacccccccagatccaaggggaaactgcaggtcaagggctgataacggccatgcaggatgcttgatgctgcgtcccccgctgcttgccgccccccaccccgccattttgtataataaagctccctgtgtattctc

SEQ ID NO: 157 - DNA, 2945 bp, Homo sapiens
ccagccccccttcccttccctgaccccttcttgccatcgccccagacatggggaacgcggcgaccgccaagaaaggcagcgaggtggagagcgtgaaagagtttctagccaaagccaaagaagactttttgaaaaaatgggagaatccaactcagaataatgccggacttgaagattttgaaaggaaaaaaacccttggaacaggttcatttggaagagtcatgttggtaaaacacaaagccactgaacagtattatgccatgaagatcttagataagcagaaggttgttaaactgaagcaaatagagcatactttgaatgagaaaagaatattacaggcagtgaattttcctttccttgttcgactggagtatgcttttaaggataattctaatttatacatggttatggaatatgtccctgggggtgaaatgttttcacatctaagaagaattggaaggttcagtgagccccatgcacggttctatgcagctcagatagtgctaacattcgagtacctccattcactagacctcatctacagagatctaaaacctgaaaatctcttaattgaccatcaaggctatatccaggtcacagactttgggtttgccaaaagagttaaaggcagaacttggacattatgtggaactccagagtatttggctccagaaataattctcagcaagggctacaataaggcagtggattggtgggcattaggagtgctaatctatgaaatggcagctggctatcccccattctttgcagaccaaccaattcagatttatgaaaagattgtttctggaaaggtccgattcccatcccacttcagttcagatctcaaggaccttctacggaacctgctgcaggtggatttgaccaagagatttggaaatctaaagaatggtgtcagtgatataaaaactcacaagtggtttgccacgacagattggattgctatttaccagaggaaggttgaagctccattcataccaaagtttagaggctctggagataccagcaactttgatgactatgaagaagaagatatccgtgtctctataacagaaaaatgtgcaaaagaatttggtgaattttaaagaggaacaagatgacatctgagctcacactcagtgtttgcactctgttgagagataaggtagagctgagaccgtccttgttgaagcagttacctagttccttcattccaacgactgagtgaggtctttattgccatcatccgtgtgcgcactctgcatccacctatgtaacaaggcaccgctaagcaagcattgtctgtgccataacacagtactagaccactttcttacttctctttgggttgtctttctcctctcctacatccatttcttccttttcaatttcattggttttctctaaacagtgctccattttattttgttggtgtttcagatgggcagtgttatggctacgtgatatttgaagggaaggataagtgttgctttcagtagttattgccaatattgttgttggtcaatggcttgaagataaactttctaataattattatttctttgagtagctcagacttggttttgccaaaactcttggtaatttttgaagatagactgtcttatcaccaaggaaatttatacaaattaagactaactttcttggaattcactattctggcaataaattttggtagactaatacagtacagctagacccagaaatttggaaggctgtagatcagaggttctagttccctttccctccttttatatcctcctctccttgagtaatgaagtgaccagcctgtgtagtgtgacaaacgtgtctcattcagcaggaaaaactaatgatatggatcatcacccagattctctcacttggtaccagcatttctgtaggtattagagaagagttctaagttttctaaaccttaactgttccttaaggattttagccagtattttaatagaacatgattaatgaaagtgacaaattttaaattttctctaatagtcctcatcataaactttttaaaggaaaataagcaaactaaaaagaacattggtttagataaatacttatactttgcaaagtcaaaaatggcttgatttttggaaacaatatagaggtattcatatttaaatgagggtttacatttgttttgttttgtaaccgttaaaaagaagttgtttccagctaattattgtggtgtactatatttgtgagcctagggtaggggcactgctgcaacttctgctttcatcccatgcctcatcaatgaggaaagggaacaaagtgtataaaacctgccacaattgtattttaattttgaggtatgatattttcagatatttcataatttctaacctctgttctctcagtaaacagaatgtctgatcgatcatgcagatacaatgttggtatttgagaggttagtttttttcctacacttttttttgccaactgacttaacaacattgctgtcaggtggaaatttcaagcacttttgcacatttagttcagtgtttgttgagaatccatggcttaacccacttgttttgctatttttttctttgcttttaattttccccatctgattttatctctgcgtttcagtgacctaccttaaaacaacacacgagaagagttaaactgggttcattttaatgatcaatttacctgcatataaaatttatttttaatcaagctgatcttaatgtatataatcattctatttgctttattatcggtgcaggtaggtcattaacaccacttcttttcatctgtaccacaccctggtgaaacctttgaagacataaaaaaaacctgtctgagatgttctttctaccaatctatatgtctttcggttatcaagtgtttctgcatggtaatgtcatgtaaatgctgatattgatttcactggtccatctatatttaaaacgtgc

SEQ ID NO: 158 - DNA, 1236 bp, Homo sapiens
agcctaaccctcacatgcatttttctctccctctgtatagggtgacagtggagggcctctggtttgcttcgagaaggacaaatacattttacaaggagtcacttcttggggtcttggctgtgcacgccccaataagcctggtgtctatgttcgtgtttcaaggtttgttacttggattgagggagtgatgagaaataattaattggacgggagacagagtgacgcactgactcacctagaggctgggacgtgggtagggatttagcatgctggaaataactggcagtaatcaaacgaagacactgtccccagctaccagctacgccaaacctcggcattttttgtgttattttctgactgctggattctgtagtaaggtgacatagctatgacatttgttaaaaataaactctgtacttaactttgatttgagtaaattttggttttggtcttcaacattttcatgctctttgttcaccccaccaattttaaatgggcagatggggggatttagctgcttttgataaggaacagctgcacaaaggactgagcaggctgcaaggtcacagaggggagagccaagaagttgtccacgcatttacctcatcagctaacgagggcttgacatgcatttttactgtctttattcctgacactgagatgaatgttttcaaagctgcaacatgcatggggagtcatgcgaaccgattctgttattgggaatgaaatctgtcaccgactgcttgacttgagcccaggggacacagagcagagagctgtatatgatggagtgaaccggtccatggatgtgtaacacaagaccaactgagagtctgaatgttattctggggcacacgtgagtctaggattggtgccaagagcatgtaaatgaacaacaagcaaatattgaaggtggaccacttatttcccattgctaattgcctgcccggttttgaaacagtctgcagtacacacggtgacaggagaatgacctgtgggagagatacatgtttagaaggaagagaaaggacaaaggcacacgttttaccatttaaaatattgttaccaaacaaaaatatccattcaaaatacaatttaacaatgcaacagtcatcttacagcagagaaatgcagagaaaagcaaaactgcaagtgactgtgaataaagggtgaatgtagtctcaaatcctcaaagagctgtgtttatttcattgacaaatagattatttgtattca

SEQ ID NO: 159 - DNA, 2520 bp, Homo sapiens
cccgggaaagtcctcagcatgatggtgttcgttggggcgggtgggcctcaagaccatgactgcagtgttgcgacaggacggacttctaaggcaaccggggtggggacggagaggtggacccggtgcttggcaaggggccctggaccggaagacggaggactgagtagtcggggcggggggggggggggacaacagtctagaaatgcgcagacatggaattagggtcacgagtttcgtttgggtcatgttcagatggagaggctgtgggatgcctttagcaacctagaccacttgcattgcagccgagctagcagcagctggtgccccgccaggccccgcgtaccttcccagggtcttggatccgcatccccgagaccctcgatttgcatacgccgctcacagcccggccaggccccgcctccgatcccgctctttgcacctcatcagggcaaggggcaggctcgggctggggagccggcgcgggcacggcggcagcccgccgagggggacgcagggcacgtcgccccgccccggcccgcccgccagctgcggcggcgcgtcgggaagtgcttggggcggcgagcatggcggcagcggctgcaggcctgggcggcggcggcgccggcccgggacccgaggccggggacttcctggcccgctaccggctggtatcgaacaagctgaagaagcggttcctgcggaagccgaacgtggcggaggccggcgagcagttcggacagctgggccgggagctgcgcgcccaggagtgtctgccctacgcggcctggtgccagctggcggtggcgcgctgccagcaggcgctcttccacgggcccggggaggcgctggccctcaccgaggccgcccgcctcttcctgcggcaggagcgcgacgcgccagcgctggtctgccccgccgcctacggggagccgctgcaggccgccgccagcgccctgggcgccgcggtgcgtctgcacctcgagctgggccagccggccgccgccgccgccctctgcctcgagctggccgccgccctgcgcgacctgggccagccggccgccgccgccggtcacttccagcgcgccgcccagctccagctgccccagctgcccctggccgcgctgcaggcgcttggcgaggccgcctcctgccagctgctggcgcgcgactacaccggcgccctggcggtcttcacgcgcatgcagcgcctggcgcgggagcacggcagccacccggtgcagtcactgccgccgcccccgccgccggcaccccagcccgggcccggggcgacgcccgccctaccggccgcgctgcttcctccgaactccggctcggcggcgccctctcccgcgccctgggcgccttctcggacgtgctggtccgctgcgaggtgtcccgcgtgctgctgctgctcctcctgcaaccaccgcccgccaagctgctgccggagcacgcccagaccctggagaagtactcctgggaggcttttgacagccacgggcaggagagcagcggccagcttcccgaggagctctttctgctgctccagtctttggtcatggctacccacgaaaaggacacggaagccatcaagtcgctgcaggtggagatgtggccactgttgactgctgagcagaaccacctccttcacctcgttctgcaagaaaccatctccccctaggacagggagtctgatccatcccattcacccagtgacttctttttgcccaggcctggactttttgcatcagtcacgttaaccagatgactttgcctgttaccaaacctcatgcatccacgtttgcgtctggggaggaataaaaagacatcgttcccgcttctgcgttttgttattcctactgccgccataggaattatttcgttggctgaacgttaccagcaccccgagaacacattttgatagaatcagagtagaggacatggctgtcttctaaaaagccacgacatgaaaatgacaatccctttcgtctccttcctccgctgcttccacctaacgcagcctcctgcctccgcctttgtttcatagtgaggattttattttgcacggcgccctccctctaaatacctaccctagatgatttcatcctgcccctcacttcttaacatattcctgtgtctttgtaatggccaaatttctccttccactcgtccgcacggtacgtcttcatgggagtcattttattccttacagcttccttgtaaccacagccctaaatccatgataaagctactcttgtactcttcactcatgtgtggttttggtgtccgtcgtctataaaatgtgactctcttacctacttgtcaggaggccagcagcagaaccagatagctgtttgggctccaggatgtattcgttcctttgaaatttgcgctatgcctcctatgtgggcaacgaacctgcagagatcatctatgatgtcctccgtactcgggtgactgcaatgcagatacatccagtgcagcgggtctggtgccgatgcatcgatttgcattgaattc

SEQ ID NO: 160 - DNA, 1511 bp, Homo sapiens
ggtcagctccaaaacaatccggaacggccagctccgggggagcacgactgggcgagaggcacagaaatggacaccagaaataaggcccagctccttgtgctcctgactcttctcagtgtgctcttctcacagacttcggcatggcctctttacagggcaccttctgctctcaggttgggtgacagaataccctttgagggagcaaatgaacctgatcaagtttcattaaaagaagacattgacatgttgcaaaatgcattagctgaaaatgacacaccctattatgatgtatccagaaatgccaggcatgctgatggagttttcaccagtgacttcagtaaactcttgggtcaactttctgccaaaaagtaccttgagtctcttatgggaaaacgtgttagcagtaacatctcagaagaccctgtaccagtcaaacgtcactcagatgcagtcttcactgacaactatacccgccttagaaaacaaatggctgtaaagaaatatttgaactcaattctgaatggaaagaggagcagtgagggagaatctcccgactttccagaagagttagaaaaatgatgaaaaagacctttggagcaaagctgatgacaacttcccagtgaattcttgaaggaaaatgatacgcaacataattaaattttagattctacataagtaattcaagaaaacaacttcaatatccaaaccaaataaaaatattgtgttgtgaatgttgtgatgtattctagctaatgtaataactgtgaagtttacattgtaaatagtatttgagagttctaaattttgtctttaactcataaaaagcctgcaatttcatatgctgtatatcctttctaacaaaaaaatatattttaatgataagtaatgctaggttaatccaattatatgagacgtttttggaagagtagtaatagagcaaaattgatgtgtttatttatagagtgtacttaactattcaggagagtagaacagataatcagtgtgtctaaatttgaatgttaagcagatggaatgctgtgttaaataaacctcaaaatgtctaagatagtaacaatgaagataaaaagacattcttccaaaaagattttcagaaaatattatgtgtttccatattttataggcaacctttatttttaatggtgttttaaaaaatctcaaatttggattgctaatcaccaaaggctctctcctgatagtctttcagttaaggagaacgacccctgcttctgacactgaaacttccctttctgcttgtgttaagtatgtgtaaaatgtgaagtgaatgaaacactcagttgttcaataataaatatttttgccataatgactcagaatattgctttggtcatatgagcttccttctgtgaaatacattttggagacacaactatttttccaaaataattttaagaaatcaaagagagaaaataaagaccttgcttatgattgcagataaaaaaaaaaaaaaaaaaaaaaaaaaaaaaaaaaaa

SEQ ID NO: 161 - DNA, 11990 bp, Homo sapiens
ctgcagatggatggtggggatagttgtacaacaatgtgaatgtacttgacgccactgaactgtatactaaaaaatggctcaaatggtgaattttattttatgtatattttatcacaatgtaaaagtgactcagctgtcaatgtactaaaatggaaccatctctaacgtgtatgtcattgaaaaaagattgattcagaagtagggggctcacataagaaaatgtggttgtgtgtacatgaatgtactctgaaggaaccagtaacaaccaaaacctggttgtctctgaagcagtgtttggggtggctgggtgtcaaagggggaaggagacttacttttcattttatgcctttttgcacatcttgaattttgtaccatatacactacccatccaaatcccttgtcggtatttttagtgtgtcccatccgagtggtcctctcggaggctgaactctccctccagcggtgctgcccagctcacagcatgttttggagtgctcctctttcacctgccttccaagcctcgggtgtgatttgcagccctccatggtagcaaatcctcaggggcgaactgaattttgaaaacctcccaagtggttcgggccaagtctggtggttgttgattttgactagagattagatggcatgatatttgtcttctgcctcttttcaccaaggaactgaggacttgggctggtccaaaggccatttccttatgtggtctggagactattcacagagaagagctccagaaatgttgtcccagtagcatcatagaaataggtgtagagtccccttcaggaagattaatctggttctttgggctgtaagtgatcaaagcaataccaaatgccttaaattaaaaaaaaaaaaaaaaaaaaacggaaagtttgttgccaaggccaggaaggacagtgtgggagctcaactcacaaagttgagggaagcactgcaggaaccaaggggctggcctgctcctcctctccagcctcctctgcttcttacatattgacctctctttcttcctactcccccagggggcaggaaacatggcttccacaggttccagttgaagaatcccagttccgtctataaattccagggaaggtctctgattggccctactcattcccaggcccattccttgacccagtcactgaagtcagggagatgcagtaataagactggctggaatcagggtctttaggggtggagggatggggaggaggcacagcatgtcatcaaaataaggaaattgcaaaagaaagcttgcaggctactttgaatgacaatgagaaagacggtgctgcctgagtgtgttaaggatccacatggtctccaaaatcctccaggagcatacagtctagtctgggagatgagacacaaaaataaccagaacacaacagcttgcactgactcgagggctggataagaatatctggaactcccccatctatttcagaagcttgtctcttggatgaaaattagacacttaatgggaaagggctttgaaaagagtgcagtaacaaagccccctttacaatttacccggcacattcacacccatcctgaggccaaagccacaggctgtgaggtctcactgtctcagcttcctgagctataaaatgggaatgatgctagtctctacctcctagggttggagaattgggggtcatgggtgtgaagtgctcagcagcttggcccacactaggtggtcagtacatgtaaggtattattgttgctacatacattagtagggcctgggcctctttaaacctttatagggtagcatggcaaggctaaccatcctcactttatatctgacaagctggggctcagagaggacgtgcctgagctggggctcagacaaggacacacctactagtaacccctccagctggtgatggcaggtctagggtaggaccagtgactggctcctaatcgagcactctattttcaggtttgcattgcaaaagggtcagtccaagagggacctggagagccaagtggaggtgtagagcacggccagtacccatggagaatggtggatgtccttaggggttagcaagtgccgtgtgctaaggagggggctttggaggttggcaggccctctgtggggctccatttttgtgggggtgggggctggagcattatagggggtgggaagtgattggggctgtcaccctagccttccttatctgacgcccacccatgcctcctcaggtacccccctgcccccacagctcctctcctgtgccttgtttcccagccatgcgttctcctctataaatacccgctctggtatttggggttggcagctgttgctgccagggagatggttgggttgacatgcggctcctgacaaaacacaaacccctggtgtgtgtgggcgtgggtggtgtgagtagggggatgaatcagggagggggcgggggacccagggggcaggagccacacaaagtctgtgcgggggtgggagcgcacatagcaattggaaactgaaagcttatcagaccctttctggaaatcagcccactgtttataaacttgaggccccaccctcgacagtaccggggaggaagagggcctgcactagtccagagggaaactgaggctcagggccagctcgcccatagacatacatggcagctttggccaggatccctccgcctgccaggctctccctgccctcccttcctgcctagagacccccaccctcaagcctggctggtctttgcctgagacccaaacctcttcgacttcaagagaatatttaggaacaaggtggtttagggcctttcctgggaacaggccttgaccctttaagaaatgacccaaagtctctccttgaccaaaaaggggaccctcaaactaaagggaagcctctcttctgctgtctcccctgaccccactcccccccaccccaggacgaggagataaccagggctgaaagaggccgctgggggctgcagacatgcttgctgcctgccctggcgaaggattggtaggcttgccgtcacaggacccccgctggctgactcaggggcgcaggctcttgcgggggagctggcctcccgcccccacggccacgggccctttcctggcaggacagcgggatcttgcagctgtcaggggaggggaggcgggggctgatgtcaggagggatacaaatagtgccgacggctgggggccctgtctcccctcgccgcatccactctccggccggccgcctgcccgccgcctcctccgtgcgcccgccagcctcgcccgcgccgtcaccatgagccaggcctactcgtccagccagcgcgtgtcctcctaccgccgcaccttcggcggcgccccggtcttctcgctcggctccccgctgagctcgcccgtgttcccgcgggcgcctttcggctctaagggctcctccagctcggtgacgtcccgcgtgtaccaggtgtcgcgcacgtcgggaggggccgggggcctggggtcgctgcgggccagccggctggggaccacccgcacgccctcctcctacggcgcaggcgagctgctggacttctcactggccgacgcggtgaaccaggagtttctgaccacgcgcaccaacgagaaggtggagctgcaggagctcaatgaccgttcgccaatctacatggagaaggtgcgcttcctggagcagcagaacgcgctcgccgccgaagtgaaccggctcaagggccgcgagccgacgcgagtggccgagctctacgaggaggagctgcgggagctgcggcgccaggtggaggtgctcactaaccagcgcgcgcgcgtcgacgtcgagcgcgacaacctgctcgacgacctgcagcggctcaaggccaagtgagggcccggcaccccagactcctctttctgcgggcagggcacaggaggctaggcctgggggctggggtcccgctgtcaccacctgccttctcccggggcccgaccgctcctcccccatgtggagaaagggtcctccacctgtgtgtttcaaggggccgtgacctccaggtctctccccctgcgatcccatcttgccacaggagttttcttggggacatagatcagggggtggatatgggagaatttaggggacccggtgccctgtggacagccccgttaaaaagcattttaagatgctggggcgatatttatggggtcaggtagttgatgggcagaggaagggctgcaggaggcccagagcgagtgtagccagagggagaagggaggctgataggagacagggaaagcagggcaagggccagagtccaagcaacagctctcagtctcagcgttgatgaggccctgggggaggtggggggaggggggagcttggccctggggcttgccgagactgtgtctttttacaaggtgaatggacaggctggagaaaaagggagtaggtgggggtcacagctctcagagagcttgggaggacctgactgtagacttcaccaggctccaagaacgaaaagggcagcaagtgtagcatatttcgctctggtcccacttctgacaggccaagtgagcacagtcaccctcctgccaccaaagtcataaatattaattgagcagctatatggccaggctggagctgggaaccagaaacacagaggtggataaaatagacacagtttctagagacccagggaggtcacacagtctggtggggacatagacttcaagggtgtggctcctgggcagagattgggccacttcctctgccctctctgggtgggtggggcctctccactccctgtctctcctgcctctacccagcagccaggccctccccctctgtcctggacccaccccctggtcagccccgccagtcgtttccactgccagctttatcacccgcaactgtctgtctttctgtctgtcccacccaggctgcaggaggagattcagttgaaggaagaagcagagaacaatttggctgccttccgagcggtgagtgcccttcttttccccttgcatggcctctcgcgtttgctctgccccacctgggtcgcggagaccatgtccttctcgcttggcctctcccaggacgtggatgcagctactctagctcgcattgacctggagcgcagaattgaatctctcaacgaggagatcgcgttccttaagaaagtgcatgaagaggtatacttggcccctcttcctggggtcactgggccattggggaaagcagccggaaagtggggtttggggtgaggctctggctgggaataggggtgtgagggtcgtgtgtgggccctgagagggactgaagcccagtcatgccctacaggagatccgtgagttgcaggctcagcttcaggaacagcaggtccaggtggagatggacatgtctaagccagacctcactgccgccctcagggatatccgggctcagtatgagaccatcgcggctaagaacatttctgaagctgaggagtggtacaagtcgaaggtgggtggcctcgcccggggactgggatctccgtccccctggaatcccaaggcctttggattgttgcttgcctgtggtaccatccatgggaggagagcccagaggttcatgctcccaagctcatccctacccgtgccctgcatccttctcatttttgggcccctttctctgcccttaggtgtcagacctgacccaggcagccaacaagaacaacgacgccctgcgccaggccaagcaggagatgatggaataccgacaccagatccagtcctacacctgcgagattgacgccctcaagggcactgtgagtccctgcccacctgggccaggccctgccccttctctgtctgcagttcacaccctcactttgtgaccttggccatcatagatcctctctggccttcatctacttaaatctacaatagggtaaaaccagacaagtggattccagttggatgctaaggaatcaggggttcctgggcatctacctatgtggggacttgtgaggctgatgcaatgttcctttgtatctattttattctgagtgttccacatatagcttaatttgagttcagggttcaacatggccaggacctgaccattctggggttgcctgccagccccaaagctttctttgggctgctagtgtcctcttcccttccttgacctgggttccccctctcctgcagaacgattccctgatgaggcagatgcgggaattggaggaccgatttgccagtgaggccagtggctaccaggacaacattgcacgcctggaggaggaaatccggcacctcaaggatgagatggcccgccatctgcgcgagtaccaggacctgctcaacgtgaagatggccctggatgtggagattgccacctaccggaagctgctggagggagaggagagccggtgaggggccaggcaggagccgagtgggaggtgcggggtgctgggtggtccatttctgtccccaggaggctcgagattactgattacctcaacaagacctggaaacaattttttttttttttgagatggagtttcgctcttgtcgcccagtctggagtgcaatggcaccatcttggctcactgcaacctccgcctcctgggttcaagcaattctcctgcctcagcttcccgagcagctgggattacaggcgcctaccaccacacctggctaatttttgtatttttagtagagaggggtttcactatgttgggcagctggtctcgaactcctgacctcaggtgatctgcctacctcagcctccaaagtactgggattacaggcgtgcgccgcgcccggcgtggaaacaattttatacaagaggccactgctctataaccgcagagaattaaccaaggccacctgggtaaaaagcaatttaattaacagcatttataaaaagagaaatataagtattcccttatccaccttcagaattaagaaccagcagcaaaaaaaaccatattcagcaaccaataataaaatattactgccagtcaagggagagatgaaagcagaatggggagtatgaggagggaaacggagggagcagatagaggcaaatagagagagggagggagagaccttcacagggataggctaagagaaggtaaagagatgcatacagaaggcatgagtttgcacacacatgcacacatgtcagcatatcacatgtcggaggaaaagacacagacgatatgctcagagcaacccactctagacacagaaacacatacactggaagggacaccagggaactgtcggatacagaatgtctatatcttttttttttttttttgagcagagtctgctctgtacagccgctaggtagcgtgtgtatctccctacactgcaacctgctcctcccaggctcaagcgctctcctgtctcagcctccctgtagctggatacaggatcgacagtgccaacacactcagactcgattttttgtatttttagtagagatgaggtttcaccatgttggtcaggctggactctaactcctgacctcaagtaattcgcctgcctcagcctcccaaagtgctgggattataggcatgagccactgtgcctggcctagaaatgttctatatcttgatttggactggtagttacacagacgtggacattgatcaaaactcattgaattgtacattaaagatctgtgcatttcactgtatgtaaatttaacctcaatttaaaacagatcagttactccaaaaactggtaccccttgatactcataaaaataactatctgaaatttttaaaaaggagcagacatgtttagatacaggtacaaacataaagagaaacttcagattttgtaaaatcacgtctacatatgatggcctttgaaggtagctaaaggcatgttgcattttcccagcattaggcctaaatagtaagctctcagaactggctggctggagggtgggcatgagcaatggatatcacccacagctgctactagtaccaacttcagtgccaggagcaagaaggaaatcctggtgctcttgagggtgcggtggggttgcacatccttagtgtcgcgcaacgcagttcacagttgaaataatgatccttccagaagagactatccctggggacagctctagctggcttcgaccccattccttagcagtatgggtggtgggagtgctggggtcgtgggactgggacagctgaggatggtgtttagaaaggaccaggtgagccttgatgggcgtgcagggaaagatcgggaggtctttttttttttttttagacagggcttgttctgtaccccaggctggagtgcagtggtgcaactccgctcactgcaagctccacctcctgggttcgcaccattctcctgcctcaccctcctgagtatctggaactacaggtgcccgccaccatgcccggctaatttttgtatttttagtagagacggggtttcactgtgttagccaggatggtctcgatctcctgacctggtgatccgcccgcctcggccttccaaagtgctgggattacagctgggcccggccgatgggagggttcttaactcttaggaggttttgtctcttcccttttaggatcaatctccccatccagacctactctgccctcaacttccgaggtgagtgtctgctggaggcggaggctggagttgcaggggccaggagtccagcatgggcactgcccaaggccagccaggagggaggatgggaccctggggctagggacagacctgagctagggaagaaaagggaccactgcgggtaggtcggggagtttaggtagaggtggatgaggcaacttatgacagagagagctttttatgtgattatattgtattgtatttaccatgtcccctgcaccttcttggagtattgggcctcagaagcagcctctgttctgaatcccaaactcatcccaaactctgaaagcaggagtgtccttggggccctggcttcaggagcatctcataccacctgccctctaagacacccacagcccattgtctgtttggcacattgccaagccccaccttggctgcttgtcgaacacctccagtttgttggagcaagatgttggatgcacgtttggaaaaaaatgccaaatcttagcaaagccaaacaatgaaaagaaagagctcttagggcactctgccattttgacattagtaatacgcagatcgggtggctttccaaccccagagagcagagaaacacaggataatgatgcattaggaaagcaagtcggagtccttggcagcttctcctttcctagatcaaaccttttctatcttcgatgtacatttccatcaggaaaaaaaacgcgctgcgtccagcgagtcacaacattcatcacaggctggttgctagctaaggaaattcgtaagcaccaaactcataataccaaggacctccatttgacctttcctacacaactcagagcctctcttttcagttagttgtttatacagacaccaagtatgagtcttgcatttaaaacttcatagtacaaaaaactccacccacattgcacagtgcttttccaaatcaatagctttgtggccatgataaggttggtaccacttcactccgtgtcctcagtgaggaaactgaggcacagaatggcaagtgactgagcatcagcacaatgagtcagtgccttattcctgctctgtctcacttaagacatcaagttgctcatctgaattttttttttcttttgaaacggagtctcgctctgtcgcccaggctggagtgcagtggtgcaatctcggctcaccgcaacctccgtcctcccaggttcaagcaattctcctgcctcagcctcctgagtagctgggattacaggcatgtgcaccagtccccctaattttgtatttttagtagagacgggttcacatgttggtcagggtggtctggaactcctggtactcatgatccactgccttggtccaaactactggcattacagatgtgaccaaccgcacctggccctgaaatcttaaagggagataggtactgtaaggtcctctaaagagtgtcttgagactgggctttggggttctatcttgaagaaggggagtcccaggagacaaatgtgtgcagggctctcctggggcctgggggtggagaggaactaggagggatggggaatgtcagtgctgtgcagcctgggcctcaggtgtcccctaccctcctgcaccatcctgcacatggagcaaatctgttggctcctgagaccatctaaactatgggacaggcgctgggggctgcagctgggtgctgggctgaaggaaaggtgttaaagtcttgaagaagtaacaagcctgtcttgagggggttggggtctgctagggctctgccaatgtggccccagatggactcccagcccctggtatagcccagcctggacttggtcaggctgagtgtgcgatggaccctgttacagaaaccagccctgagcaaaggggttctgaggtccataccaagaagacggtgatgatcaagaccatcgagacacgggatggggaggtaagtggtctgtctgggctccttacccttggttggggctatggatgtgtctggggggactgtcttccaccagctgtgcaggtctaggtcctggctagtgggcaagagagatcctgcgatcctgggtgggatgcctaggctgacgtcatcctgctagcacatgtgactggactcctctccccaggtcgtcagtgaggccacacagcagcagcatgaagtgctctaaagacgagagaccctctgccaccagagaccgtcctcacccctgtcctcactgctccctgaagcccagccttcttccgatcccaggacaccacacccagcctcagtcctccaaatcacagcctctgacccctcctcactggccatccctcgtggtccccaacagcgacatagcccatccctgcctggtcacaggcatgccccggccacctctgcggaccccagctgtgagccttggctgttggcagtgagtgagcctggctcttgtgctggatggagcccaggcgggagcggtggccctgtccctcccacctctgtgacctcaggcctacgctttggctctggagatagccccagagcagggtgttgggatactgcagggccaggactgagccccgcagacctccccagcccctagcccaggagagagaaagccaggcaggtagcctgggggactagccctgtggagactggggggcttgaaattgtccccgtggtctcttactttcctttccccagcccagggtggacttagaaagcaggggctacaagagggaatccccgaaggtgctggaggtgggagcaggagattgagaaggagagaaagtgggtgagatgctggagaagagaggagaggagagaggcagagagcggtctcaggctggtgggaggggcgcccacctccccacgccctccccccccctgctgcaggggctctggagagaaacaataaagagattcacacacaagccaagctggcccctgttgtcttgactgccaggtctcctgtgggtcccctggccggtgtgatacaacctgtcaccctgagatggactatactgaccttctacccagccagacttttcccagggcctcgcgccacttctgttcccagagccacctggccttgatgtctgtatgcagtgtatgggggtggaggggctggacagggcttttgttggggaaccacaaatacctctgcttaggccccagttccaggactgcaccccttgtgctctctactacaccttcaggtcagccaggctgggggacaccacctgctattccttttgaaggatgtacctgctccccactgactggctctgaagtagggctcccccagtcccttcttcaaagatgccaagagcccctttttttctctctctctttttttctttttgagatggagtcttgctgtgtcacccaggctggagtgcagcagtgtgatcaccgcttactgcagcctggacttcctgagctc

SEQ ID NO: 162 - DNA, 1635 bp, Homo sapiens
cagagtcagaaaactccccagctaaacacccgtaagacttcatacaacacaatactctatactgtgatgatcacagctgccaaggctacctaaaagaagacagttatctcatatttggctgccagctttttatctttctctcgaccacttaaaacttcagacttcctgtcctgctggtatcatggagaaagtccaatacctcactcgctcagctataagaagagcctcaaccattgaaatgcctcaacaagcacgtcaaaagctacagaatctatttatcaatttctgtctcatcttaatatgtctcttgctgatctgtatcatcgtgatgcttctctgaagttctgctacaacctctagatctgcagcttgccacatcagcttaaaatctgtcatcccatgcagacaggaaaacaatattgtataacagaccacttcctgagtagaagagtttctttgtgaaaaggtcaagattaagactaaaacttattgttaccatatgtattcatctgttggatcttgtaaacatgaaaagggctttattttcaaaaattaacttcaaaataagtgtataaaatgcaactgttgatttcctcaacatggctcacaaatttctatcccaaatcttttctgaagatgaagagtttagttttaaaactgcactgccaacaagttcacttcatatataaagcattatttttactcttttgaggtgaatataatttatattacaatgtaaaagcttctttaatactaagtatttttcaggtcttcaccaagtatcaaagtaataacacaaatgaagtgtcattattcaaaatagtccactgactcctcacatctgttatcttattataaagaactatttgtagtaactatcagaatctacattctaaaacagaaattgtattttttctatgccacattaacatcttttaaagttgatgagaatcaagtatggaaaagtaaggccatactcttacataataaaattccttttaagtaattttttcaaagaatcacagaattctagtacatgtaggtaaatcataaatctgttctaagacatatgatcaacagatgagaactggtggttaatatgtgacagtgagattagtcatatcactaatatactaacaacagaatctaatcttcatttaaggcactgtagtgaattatctgagctagagttacctagcttaccatactatatctttggaatcatgaaaccttaagacttcagaatgattttgcaggttgtcttccattccagcctaacatccaatgcaggcaaggaaaataaaagatttccagtgacagaaaaatatattatctcaagtattttttaaaaatatatgaattctctctccaaatattaactaattattagattatattttgaaatgaacttgttggcccatctattacatctacagctgacccttgaacatgggggttaggggagctgacaattcgtgggtccgcaaaatcttaactacctaatagcctactattgaccataaaccttactgataacataaacagtaaattaacacatattttgcgtgttatatgtattatacactatattcctacaataaagtaagctagagaaaatgttatttagaaaatcat

SEQ ID NO: 163 - DNA, 3541 bp, Homo sapiens
tccagtttgcttcttggagaacactggacagctgaataaatgcagtatctaaatataaaagaggactgcaatgccatggctttctgtgctaaaatgaggagctccaagaagactgaggtgaacctggaggcccctgagccaggggtggaagtgatcttctatctgtcggacagggagcccctccggctgggcagtggagagtacacagcagaggaactgtgcatcagggctgcacaggcatgccgtatctctcctctttgtcacaacctctttgccctgtatgacgagaacaccaagctctggtatgctccaaatcgcaccatcaccgttgatgacaagatgtccctccggctccactaccggatgaggttctatttcaccaattggcatggaaccaacgacaatgagcagtcagtgtggcgtcattctccaaagaagcagaaaaatggctacgagaaaaaaaagattccagatgcaacccctctccttgatgccagctcactggagtatctgtttgctcagggacagtatgatttggtgaaatgcctggctcctattcgagaccccaagaccgagcaggatggacatgatattgagaacgagtgtctagggatggctgtcctggccatctcacactatgccatgatgaagaagatgcagttgccagaactgcccaaggacatcagctacaagcgatatattccagaaacattgaataagtccatcagacagaggaaccttctcaccaggatgcggataaataatgttttcaaggatttcctaaaggaatttaacaacaagaccatttgtgacagcagcgtgtccacgcatgacctgaaggtgaaatacttggctaccttggaaactttgacaaaacattacggtgctgaaatatttgagacttccatgttactgatttcatcagaaaatgagatgaattggtttcattcgaatgacggtggaaacgttctctactacgaagtgatggtgactgggaatcttggaatccagtggaggcataaaccaaatgttgtttctgttgaaaaggaaaaaaataaactgaagcggaaaaaactggaaaataaagacaagaaggatgaggagaaaaacaagatccgggaagagtggaacaatttttcattcttccctgaaatcactcacattgtaataaaggagtctgtggtcagcattaacaagcaggacaacaagaaaatggaactgaagctctcttcccacgaggaggccttgtcctttgtgtccctggtagatggctacttccggctcacagcagatgcccatcattacctctgcaccgacgtggcccccccgttgatcgtccacaacatacagaatggctgtcatggtccaatctgtacagaatacgccatcaataaattgcggcaagaaggaagcgaggaggggatgtacgtgctgaggtggagctgcaccgactttgacaacatcctcatgaccgtcacctgctttgagaagtctgagcaggtgcagggtgcccagaagcagttcaagaactttcagatcgaggtgcagaagggccgctacagtctgcacggttcggaccgcagcttccccagcttgggagacctcatgagccacctcaagaagcagatcctgcgcacggataacatcagcttcatgctaaaacgctgctgccagcccaagccccgagaaatctccaacctgctggtggctactaagaaagcccaggagtggcagcccgtctaccccatgagccagctgagtttcgatcggatcctcaagaaggatctggtgcagggcgagcaccttgggagaggcacgagaacacacatctattctgggaccctgatggattacaaggatgacgaaggaacttctgaagagaagaagataaaagtgatcctcaaagtcttagaccccagccacagggatatttccctggccttcttcgaggcagccagcatgatgagacaggtctcccacaaacacatcgtgtacctctatggcgtctgtgtccgcgacgtggagaatatcatggtggaagagtttgtggaagggggtcctctggatctcttcatgcaccggaaaagtgatgtccttaccacaccatggaaattcaaagttgccaaacagctggccagtgccctgagctacttggaggataaagacctggtccatggaaatgtgtgtactaaaaacctcctcctggcccgtgagggaatcgacagtgagtgtggcccattcatcaagctcagtgaccccggcatccccattacggtgctgtctaggcaagaatgcattgaacgaatcccatggattgctcctgagtgtgttgaggactccaagaacctgagtgtggctgctgacaagtggagctttggaaccacgctctgggaaatctgctacaatggcgagatccccttgaaagacaagacgctgattgagaaagagagattctatgaaagccggtgcaggccagtgacaccatcatgtaaggagctggctgacctcatgacccgctgcatgaactatgaccccaatcagaggcctttcttccgagccatcatgagagacattaataagcttgaagagcagaatccagatattgtttccagaaaaaaaaaccagccaactgaagtggaccccacacattttgagaagcgcttcctaaagaggatccgtgacttgggagagggccactttgggaaggttgagctctgcaggtatgaccccgaagacaatacaggggagcaggtggctgttaaatctctgaagcctgagagtggaggtaaccacatagctgatctgaaaaaggaaatcgagatcttaaggaacctctatcatgagaacattgtgaagtacaaaggaatctgcacagaagacggaggaaatggtattaagctcatcatggaatttctgccttcgggaagccttaaggaatatcttccaaagaataagaacaaaataaacctcaaacagcagctaaaatatgccgttcagatttgtaaggggatggactatttgggttctcggcaatacgttcaccgggacttggcagcaagaaatgtccttgttgagagtgaacaccaagtgaaaattggagacttcggtttaaccaaagcaattgaaaccgataaggagtattacaccgtcaaggatgaccgggacagccctgtgttttggtatgctccagaatgtttaatgcaatctaaattttatattgcctctgacgtctggtcttttggagtcactctgcatgagctgctgacttactgtgattcagattctagtcccatggctttgttcctgaaaatgataggcccaacccatggccagatgacagtcacaagacttgtgaatacgttaaaagaaggaaaacgcctgccgtgcccacctaactgtccagatgaggtttatcagcttatgagaaaatgctgggaattccaaccatccaatcggacaagctttcagaaccttattgaaggatttgaagcacttttaaaataagaagcatgaataacatttaaattccacagattatcaa

SEQ ID NO: 164 - DNA, 2491 bp, Homo sapiens
ctggcaggcaggactgggatcgaggcccagaaaacggagcagcgggcaccagggaggcctggaacggggcgagcgccatgagcaacaaatgcgacgtggtcgtggtggggggcggcatctcaggtatggcagcagccaaacttctgcatgactctggactgaatgtggttgttctggaagcccgggaccgtgtgggaggcaggacttacactcttaggaaccaaaaggttaaatatgtggaccttggaggatcctatgttggaccaacccagaatcgtatcttgagattagccaaggagctaggattggagacctacaaagtgaatgaggttgagcgtctgatccaccatgtaaagggcaaatcataccccttcagggggccattcccacctgtatggaatccaattacctacttagatcataacaacttttggaggacaatggatgacatggggcgagagattccgagtgatgccccatggaaggctccccttgcagaagagtgggacaacatgacaatgaaggagctactggacaagctctgctggactgaatctgcaaagcagcttgccactctctttgtgaacctgtgtgtcactgcagagacccatgaggtctctgctctctggttcctgtggtatgtgaagcagtgtggaggcacaacaagaatcatctcgacaacaaatggaggacaggagaggaaatttgtgggcggatctggtcaagtgagtgagcggataatggacctccttggagaccgagtgaagctggagaggcctgtgatctacattgaccagacaagagaaaatgtccttgtggagaccctaaaccatgagatgtatgaggctaaatatgtgattagtgctattcctcctactctgggcatgaagattcacttcaatccccctctgccaatgatgagaaaccagatgatcactcgtgtgcctttgggttcagtcatcaagtgtatagtttattataaagagcctttctggaggaaaaaggattactgtggaaccatgattattgatggagaagaagctccagttgcctacacgttggatgataccaaacctgaaggcaactatgctgccataatgggatttatcctggcccacaaagccagaaaactggcacgtcttaccaaagaggaaaggttgaagaaactttgtgaactctatgccaaggttctgggttccctagaagctctggagccagtgcattatgaagaaaagaactggtgtgaggagcagtactctgggggctgctacacaacttatttcccccctgggatcctgactcaatatggaagggttctacgccagccagtggacaggatttactttgcaggcaccgagactgccacacactggagcggctacatggagggggctgtagaggccggggagagagcagcccgagagatcctgcatgccatggggaagattccagaggatgaaatctggcagtcagaaccagagtctgtggatgtccctgcacagcccatcaccaccacctttttggagagacatttgccctccgtgccaggcctgctcaggctgattggattgaccaccatcttttcagcaacggctcttggcttcctggcccacaaaagggggctacttgtgagagtctaaagagagagggtgtctgtaatcacactctcttcttactgtatttgggatatgagtttggggaaagagttgcaagtaaagttccatgaagacaaatagtgtggagtgaggcgggggagcatgaagataaatccaactctgactgtaaaatacaatggtatctctttctccgttgtggcccctgcttagtgtcccttacctggcttagcgttctgtttcaccagtttccaagtttattgccctcaaatctttagaatagttaaattggcttgtttaaggttcttgctgccccacaacacaccttgcccatgcacaggatgaattttttcctaccattatggctttgtgcttgttcttcctcttacctgtatagcctcacttccctagttctttgcattcgtccttaggtactgtattgttacagctgaaagacagtaaagaccatttagtcctcaccttctgttttagagttgagcaaactgaagcccacagaggtggaacttaattacctaagagccacaataagccactggtatctgggggactagaacacaaataattgcttttcccacctctttggatgttttccccaattatcctccttcactccctgtcatagttaccgatggtgtcccgttgtgtgggtttactctgtgctaagttgtcttacacttctcaaatgctactcagtatatagccttaactcttactgttttgtgcggtgtgtctccagctgattttaacttttttgatggtagaaattttatctcttcttccttttgtatcctccattgtatcttcatacaaaggacagtacacacttgggtaattaaaaataaaagttgattgaccat

SEQ ID NO: 165 - DNA, 1268 bp, Homo sapiens
tgttgtgtcttgttgcgggcaccgcagtcgccgtgaagatggcgtctaccagccgtttggatgctcttccaagagtcacatgtccaaaccatccagatgcgattttagtggaggactacagagccggtgatatgatctgtcctgaatgtggcttggttgtaggtgaccgggttattgatgtgggatctgaatggcgaactttcagcaatgacaaagcaacaaaagatccatctcgagttggagattctcagaatcctcttctgagtgatggagatttgtctaccatgattggcaagggcacaggagctgcaagttttgacgaatttggcaattctaagtaccagaatcggagaacaatgagcagttctgatcgggcaatgatgaatgcattcaaagaaatcactaccatggcagacagaatcaatctacctcgaaatatagttgatcgaacaaataatttattcaagcaagtatatgaacagaagagcctgaagggaagagctaatgatgctatagcttctgcttgtctctatattgcctgtagacaagaaggggttcctaggacatttaaagaaatatgtgccgtatcacgaatttctaagaaagaaattggtcggtgttttaaacttattttgaaagcgctagaaaccagtgtggatttgattacaactggggacttcatgtccaggttctgttccaacctttgtcttcctaaacaagtacagatggcagctacacatatagcccgtaaagctgtggaattggacttggttcctgggaggagccccatctctgtggcagcggcagctatttacatggcctcacaggcatcagctgaaaagaggacccaaaaagaaattggagatattgctggtgttgctgatgttacaatcagacagtcctatagactgatctatcctcgagccccagatctgtttcctacagacttcaaatttgacaccccagtggacaaactaccacagctataaattgaggcagctaacgtcaaattcttgaatacaaaactttgcctgttgtacatagcctatacaaaatgctgggttgagcctttcatgaggaaaaacaaaagacatggtacgcattccagggctgaatactattgcttggcattctgtatgtatatactagtgaaacatatttaatgatttaaatttcttatcaaatttcttttgtagcaatctaggaaactgtattttggaagatatttgaaattatgtaattcttgaataaaacatttttcaaaactc

SEQ ID NO: 166 - DNA, 3397 bp, Homo sapiens
atggcggccttcagcaagtacttgacggcgcggaactcctcgctggctggtgccgcgttcctgctgctctgcctgctccacaagcggcgccgcgccctcggcctgcacggtaagaaaagtggaaaaccaccattacagaacaatgagaaagaggggaaaaaagagcgagctgtggtggacaaggtgtttttctcaaggctcatacagattctgaaaatcatggtccctagaacattttgtaaagagacaggttacttggtacttattgctgttatgctggtgtctcgaacatattgtgatgtttggatgattcaaaatgggacactaattgaaagtggtatcattggtcgtagcaggaaagatttcaagagatacttactcaacttcatcgctgccatgcctcttatctctctggttaataacttcttgaagtatgggttaaatgagcttaaactgtgcttccgagtaaggctcactaaatacctctatgaggagtatcttcaagctttcacatattataaaatggggaatctggacaacagaatagctaatccagaccagctgcttacacaagatgtagaaaaattttgtaacagtgtagtcgatctgtattcaaatcttagtaagccatttttagacatagttttgtatatctttaagttaacgagtgcaattggagctcagggcccagcgagcatgatggcctacttggttgtttctgggctattcctaactcgacttcgaagacccattggtaagatgacaataactgagcaaaagtatgaaggagaatatagatatgttaattctcggctcatcacaaacagtgaagaaattgccttttacaatgggaataaaagagaaaagcagacagtccactcagtcttccgaaaactggtggaacacctacataatttcattttgtttcggttttcaatgggcttcattgatagtattattgccaaataccttgccactgttgttggttacctagttgtcagtcgccctttcttagatttgtctcatcctcgacatctcaagagtacacattcggaacttctagaggattactaccaaagtggaagaatgcttttgcgaatgtctcaagctctgggtcgaatagttttggctgggcgtgaaatgactagattggccggttttactgctcggattacagaattaatgcaagtactgaaggatttaaatcatggcaaatatgagcgcacaatggtctcacaacaggaaaagggtattgaaggagtacaagtcattcccttgatacctggtgctggagaaatcattattgcagataacattataaagtttgatcatgttcctttagcaacgccaaatggagatgttttgatccgagaccttaattttgaagttcgatctggggctaatgttctaatttgtggtccaaatggctgcggaaagagttcacttttccgtgttcttggtgaattatggcctctttttggaggacgtctaactaaacctgaaagaggaaaattattttatgttcctcagagaccttacatgacccttggaacacttcgagatcaagtgatatatccagatggacgagaagatcagaaaaggaagggaatttctgacctagtactgaaggaatacttagacaatgtccagttgggtcatatccttgaacgtgaaggaggctgggacagtgttcaggattggatggacgtactcagtggtggagaaaagcaaagaatggcgatggcaagattattttatcataaaccccagtttgccattttggatgaatgcacaagtgcagttagtgtcgacgtggaaggctacatttatagtcattgtcgaaaggttggcatcactctcttcactgtgtctcataggaaatctctttggaaacatcatgagtactacctgcatatggatggcagaggcaactatgaattcaaacagataacagaagatacagttgagtttggctcttagagaaatctggagaactatacctgcttcagtgaaataattacagaatatacttagaaaggcaaagtacattgtaaaataaagttgagcttagttttttttaaaaaaaaaaaacaaagcaacaaattaactagatacagaataatggagaacaagttgttaaaacatttaatattatataggatattgctaattgtgtatatgttggtttaattaataatatgtactaagaatgtccttattcttgtggttaaaaacctgcctaaattaaattgggcttcaatcactgtaacctgattcatcctgggatgtaaaccattcgaagtcagctaattggacttttatggctctatcttttccttcagtgaagaaccctatttaaaactgggtcatcatttgtcctgttctagcaagatagtcttcagtttcattttcctgtgccctgtggtagttggaaacaaatcataatgtattatttaaatgtttaacatcattgcataacagcgtttattatacagtggcagatttctttagctgccacagtaatactcattccttgtgtgtgtcttggagtgcatttgactccaggaaaagccattttggttttccttaactaaatgataaatgtacccctctcagtctgcagtattgagttgtttaaagtatatgtgcagtcttgcttacaaggaggggttaccatgtatcacacctaatcttcccaatgtttgggatattaaaacacaaagtccttaacatgccaggctcaaggtcttataagagttctagatttttaagagaattagacaaatttgtgtgtgttagaagcccattcattagaagtgtggtggttatttggtattaaactccaaatgagccataggaaggcactacatgaaataatgcactgagtatgcaatgctatcactgtctttgactgtgattttatgtttaaaaagtatgttctaaaattattatatatacatgggtgaattatgtttccgaggcactgttttatctctgtgaatcttgaataacttttttatatttgggttatgatgtcaaacgatcctaagcgaagatgatttcagttcatcaaatcatcattaatgactttatgtattatttgcacagggagaattgaaactgagtataatcaataagctagatacgaaatcagtttctcaaactgagcttcagaaaggggcattttgtactcttgtttttgcataactggttttgtttttttgcagaattaactataacaatcactggctaccgaagtaaactgatgtactgaattccataatacataacattcaatttttaccacttctgtttagcgaacttgtatacttattttctgttcagattaaaaaaaaaaaaaaaaaaaactcagatatcctataaaaaaaaaaggaat

SEQ ID NO: 167 - DNA, 2920 bp, Homo sapiens
cttgcagcaatggcttggattagatccacttgcattctcttttttaccttgctttttgcccacatagcagctgtaccgattaagcatcttcctgaagaaaatgtacatgatgcagattttggtgaacagaaggatatttcagaaatcaatttagctgcaggcttggacctctttcaaggggacatcctcttgcagaaatccagaaatggcctgagagacccaaacaccaggtggacgttccccattccttacatcttggctgataatttggggctgaatgctaaaggagccattctgtatgcctttgagatgttccgtctcaagtcctgtgtggatttcaagccctatgaaggagagagctcatatatcatatttcaacagtttgatgggtgctggtctgaggttggtgaccaacatgtgggacagaacatttccattggccaaggatgtgcctataaggccatcatagaacacgagatcctgcatgctttgggattttaccacgagcagtcaaggacggaccgggatgattatgtgaacatctggtgggaccaaattctttcaggttaccagcacaactttgacacctatgatgatagcttaatcacagacctcaatacaccctatgattatgagtctttgatgcactaccagcctttctcatttaacaagaatgcaagtgttcccaccatcacagccaagatccctgagtttaactccattatcggacaacgcctggatttcagtgccattgatttagagaggctgaaccgaatgtacaattgcaccacaactcacactcttttggaccactgtacttttgagaaggcaaacatctgtggaatgattcagggcaccagagatgacactgactgggcccatcaggacagtgctcaggctggagaagtggatcacaccttgttgggacaatgcacaggtgccggctacttcatgcagttcagcaccagctcggggtccgcggaagaggcagccctactggagtctcggattctttacccaaagaggaagcagcagtgcctgcaatttttctataaaatgacgggaagtccttcagacagactcgttgtctgggtcaggagggatgacagcacaggcaatgttcgcaagttggtgaaggtgcagacttttcaaggagatgatgaccacaattggaaaattgcccatgtggtgctcaaagaggaacagaagtttcgctaccttttccagggcacaaaaggcgaccctcagaactcaactgggggaatttacctagatgacatcactctgacagaaaccccctgccccacaggggtctggacagtccggaatttctcccaagtccttgagaacaccagcaaaggggacaagcttcagagccctcgattctacaattcggagggatatggttttggggtaactttatacccaaatagcagagaaagctctggttacttgagacttgcttttcatgtgtgcagtggggagaacgatgctatcctggagtggccggtagaaaacagacaggtgataattaccatccttgaccaggagcctgatgtccggaacaggatgtcctcaagcatggtgttcactacctcgaagtcgcacacatctccagcgataaatgacactgtcatctgggacaggccgtccagggtgggaacctatcatacagactgtaattgttttagaagcatcgacttgggctggagtggtttcatttcccaccaaatgctgaaaaggaggagtttcctgaaaaatgatgacctcatcatatttgtggactttgaagatatcacccacctcagccagactgaagttccctctaaaggcaaaagactgagcccccaaggcctcattctccaaggccaggagcagcaggtctccgaagaaggttcgggaaaggccatgttagaggaagccctacctgtcagcctgagccaggggcagcccagccgacagaagcggtcggtggagaacacaggccccctggaggaccataactggccacagtacttcagagacccatgtgacccaaacccttgccaaaatgacggcatctgtgtgaacgtgaaggggatggcgagctgcaggtgcatctctggacatgctttcttctacacgggggagcgctgtcagtcggccgaggtgcacggcagtgtcctgggcatggtgatcggaggcacggctggcgtgatcttcttgaccttctccatcatcgccatcctttcccaaaggccaaggaagtgacctgcctgctggcattggccagaccacagcagcacctcctccatgcaggccttaactttcccatgttcaatgcagtttggggcagcttttttatcagccttgctttggataggacctccaaggactaagcctccagccccatgtgtgacccttgtcatctctctgccccacataattatgttactttgctatgtgctcctaatgtatctagtgtgtcctgtgacaacactcatcacacttcattgtaaatcacttgttttattgactgtctttcctatagactgtaagctccatgagggcaggcacatgttgttctcattgaccgtgctggccccagtgcctagatgcatggctggcacattgttggcactcaacaatggttgaatgaataaaacaataaatgaatgaataactaagatatagaaactctcatttatattgcagattgaatatatatgatgaaattcttatgttgaatatgttagaatcaaatactcatttttcattagatacagtagtgtcatcactcttttaagatcttgttaaagatttcaaataaaggtacttctggcgagccaggctgcacagcatttgctttcctctgagattctaagagaaggcctttaataaatttaataaatattgagttagcaaaaaaaaaaaaaaaaaa

SEQ ID NO: 168 - DNA, 1105 bp, Homo sapiens
gctcggtgcgcgaccccggctcagaggactctttgctgtcccgcaagatgcggatgctgctggcgctcctggccctctccgcggcgcggccatcggccagtgcagagtcacactggtgctacgaggttcaagccgagtcctccaactacccctgcttggtgccagtcaagtggggtggaaactgccagaaggaccgccagtcccccatcaacatcgtcaccaccaaggcaaaggtggacaaaaaactgggacgcttcttcttctctggctacgataagaagcaaacgtggactgtccaaaataacgggcactcagtgatgatgttgctggagaacaaggccagcatttctggaggaggactgcctgccccataccaggccaaacagttgcacctgcactggtccgacttgccatataagggctcggagcacagcctcgatggggagcactttgccatggagatgcacatagtacatgagaaagagaaggggacatcgaggaatgtgaaagaggcccaggaccctgaagacgaaattgcggtgctggcctttctggtggaggctggaacccaggtgaacgagggcttccagccactggtggaggcactgtctaatatccccaaacctgagatgagcactacgatggcagagagcagcctgttggacctgctccccaaggaggagaaactgaggcactacttccgctacctgggctcactcaccacaccgacctgcgatgagaaggtcgtctggactgtgttccgggagcccattcagcttcacagagaacagatcctggcattctctcagaagctgtactacgacaaggaacagacagtgagcatgaaggacaatgtcaggcccctgcagcagctggggcagcgcacggtgataaagtccggggccccgggtcggccgctgccctgggccctgcctgccctgctgggccccatgctggcctgcctgctggccggcttcctgcgatgatggctcacttctgcacgcagcctctctgttgcctcagctctccaagttccaggcttccggtccttagccttcccaggtgggactttaggcatgattaaaatatggacatatttttggag

SEQ ID NO: 169 - DNA, 2558 bp, Homo sapiens
ctggaagccagtcctcaggcagccagcctcccctcctgcataggctgggatgaggcagcctttctggccatgcagctgtggggacagcttcccaagatgagggcaacagtttctcaattcctgactcagccattttccctcagcccccatcctgaggtggatttggggggcatgggaggcagggctctttccctgtttccctgcaggcttccaggaggtggggtgaggcagtggtgcatccctgggtgggtgggttctgagcaaccactgctgggcagcacagaaccagacatggagcaccttgtctctccaggtgtccctggccagtgtccttccacctgtccacaagcatggggaacatcttcgccaacctcttcaagggcctttttggcaaaaaagaaatgcgcatcctcatggtgggcctggatgctgcagggaagaccacgatcctctacaagcttaagctgggtgagatcgtgaccaccattcccaccataggtgaggtgggggccagcagggagtgggctgggctgggctgggccaaggtacaaggcctcaccctgcatcccgcacccaggcttcaacgtggaaaccgtggagtacaagaacatcagcttcactgtgtgggacgtgggtggccaggacaagatccggcccctgtggcgccactacttccagaacacacaaggtaagtggctggggcctggtcccatgggcactcctgcttctagagagggggggccagcccatagatggggcatcgatgcccatagatgcggcaggggggctgtgttcccatgaccatttgacactggctgcccggcaggcctgatcttcgtggtggacagcaatgacagagagcgtgtgaacgaggcccgtgaggagctcatgaggatgctggccgaggacgagctccgggatgctgtcctcctggtgttcgccaacaagcaggtaggcgcccgggccagcctggggaatgtgaggagccagtgtgggttccgcctggtggtaggggttactggaggctggtggggcccctttctctgtcctgtggacagcccttcccaccaacccttccttcccccaggacctccccaacgccatgaatgcggccgagatcacagacaagctggggctgcactcactacgccacaggaactggtacattcaggccacctgcgccaccagcggcgacgggctctatgaaggactggactggctgtccaatcagctccggaaccagaagtgaacgcgacccccctccctctcactcctcttgccctctgctttactctcatgtggcaaacgtgcggctcgtggtgtgagtgccagaagctgcctccgtggtttggtcaccgtgtgcatcgcaccgtgctgtaaatgtggcagacgcagcctgcggccaggctttttatttaatgtaaatagtttttgtttccaatgaggcagtttctggtactcctatgcaatattactcagctttttttattgtaaaaagaaaaatcaactcactgttcagtgctgagaggggatgtaggcccatgggcacctggcctccaggagtcgctgtgttgggagagccggccacgcccttggctttagagctgtgttgaaatccattttggtggttggtttttaacccaaactcagtgcattttttaaaatagttaagaatccaagtcgagaacacttgaacacacagaagggagaccccgcctagcatagatttgcagttacggcctggatgccagtcgccagcccagctgttcccctcgggaacatgaggtggtggtggcgcagcagactgcgatcaattctgcatggtcacagtagagatccccgcaactcgcttgtccttgggtcaccctgcattccatagccatgtgcttgtccctgtgctcccacggttcccaggggccaggctgggagcccacagccaccccactatgccgcaggccgccctacccaccttcaggcagcctatgggacgcagggccccatctgtccctcggtcgccgtgtggccagagtgggtccgtcgtccccaacactcgtgctcgctcagacactttggcaggatgtctggggcctcaccagcaggagcgcgtgcaagccgggcaggcggtccacctagacccacagcccctcgggagcaccccacctctgtgtgtgatgtagctttctctccctcagcctgcaagggtccgatttgccatcgaaaaagacaacctctacttttttcttttgtattttgataaacactgaagctggagctgttaaatttatcttggggaaacctcagaactggtctatttggtgtcgtggaacctcttactgctttcaatacacgattagtaatcaactgttttgtatacttgttttcagttttcatttcgacaaacaagcactgtaattatagctattagaataaaatctcttaactatttcaccggctctccagtgcttccacacaggcatgctgcccccaggagatggtgggtgcatcagccagctttactctaggaagtacaggtgactgcctagggccgccacctcagt

SEQ ID NO: 170 - DNA, 1071 bp, Homo sapiens
gcagttctggtcctcctaggagcggccgcctgcgcggcgcggccccgtggtcggatgctgggcggcagagaggccgaggcgcacgcgcggccctacatggcgtcggtgcagctgaacggcgcgcacctgtgcgcaggcgtcctggtggcggagcggtgggtgctgagcgcggcgcactgcctggaggacgcggccgacgggaaggtgcaggttctcctgggcgcgcactccctgtcgcagccggagccctccaagcgcctgtacgacgtgctccgcgcagtgccccacccggacagccagcccgacaccatcgaccacgacctcctgctgctacagctgtcggagaaggccacactgggccctgctgtgcgccccctgccctggcagcgcgtggaccgcgacgtggcaccgggaactctctgcgacgtggccggctggggcatagtcaaccacgcgggccgccgcccggacagcctgcagcacgtgctcttgccagtgctggaccgcgccacctgcaaccggcgcacgcaccacgacggcgccatcaccgagcgcttgatgtgcgcggagagcaatcgccgggacagctgcaagggtgactccgggggcccgctggtgtgcgggggcgtgctcgagggcgtggtcacctcgggctcgcgcgtttgcggcaaccgcaagaagcccgggatctacacccgcgtggcgagctatgcggcctggatcgacagcgtcctggcctagggtgccggggcctgaaggtcagggtcacccaagcaacaaagtcccgagcaatgaagtcatccactcctgcatctggttggtctttattgagcacctactatatgcagaaggggaggccgaggtgggaggatcattggatctcaggagttggagatcagcatgggccacgtagcgcgactccatctctacaaataaataaaaattagctgggcaattggcgggcatggaggtgggtgcttgtagttccagctactcaggaggctgaggtgggaggatgacttgaacgcaggaggctgaggctgcagtgagttgtgattgcaccactgccct

SEQ ID NO: 171 - DNA, 3244 bp, Homo sapiens
ccggccgcgagccccgggggccccgaggccgcagcttgcctgcgcgctctgagccttcgcaactcgcgagcaaagtttggtggaggcaacgccaagcctgagtcctttcttcctctcgttccccaaatccgagggcagcccgcgggcgtcatgcccgcgctcctccgcagcctggggtacgcgtgaagcccgggaggcttggcgccggcgaagacccaaggaccactcttctgcgtttggagttgctccccccaaccccgggctcgtcgctttctccatcccgacccacgcggggcgcggggacaacacaggtcgcggaggagcgttgccattcaagtgactgcagcagcagcggcagcgcctcggttcctgagcccaccgcaggctgaaggcattgcgcgtagtccatgcccgtagaggaagtgtgcagatgggattaacgtccacatggagatatggaagaggaccggggattggtaccgtaaccatggtcagctggggtcgtttcatctgcctggtcgtggtcaccatggcaaccttgtccctggcccggccctccttcagtttagttgaggataccacattagagccagaagagccaccaaccaaataccaaatctctcaaccagaagtgtacgtggctgcgccaggggagtcgctagaggtgcgctgcctgttgaaagatgccgccgtgatcagttggactaaggatggggtgcacttggggcccaacaataggacagtgcttattggggagtacttgcagataaagggcgccacgcctagagactccggcctctatgcttgtactgccagtaggactgtagacagtgaaacttggtacttcatggtgaatgtcacagatgccatctcatccggagatgatgaggatgacaccgatggtgcggaagattttgtcagtgagaacagtaacaacaagagagcaccatactggaccaacacagaaaagatggaaaagcggctccatgctgtgcctgcggccaacactgtcaagtttcgctgcccagccggggggaacccaatgccaaccatgcggtggctgaaaaacgggaaggagtttaagcaggagcatcgcattggaggctacaaggtacgaaaccagcactggagcctcattatggaaagtgtggtcccatctgacaagggaaattatacctgtgtggtggagaatgaatacgggtccatcaatcacacgtaccacctggatgttgtggagcgatcgcctcaccggcccatcctccaagccggactgccggcaaatgcctccacagtggtcggaggagacgtagagtttgtctgcaaggtttacagtgatgcccagccccacatccagtggatcaagcacgtggaaaagaacggcagtaaatacgggcccgacgggctgccctacctcaaggttctcaaggtttcggctgagtccagctcctccatgaactccaacaccccgctggtgaggataacaacacgcctctcttcaacggcagacacccccatgctggcaggggtctccgagtatgaacttccagaggacccaaaatgggagtttccaagagataagctgacactgggcaagcccctgggagaaggttgctttgggcaagtggtcatggcggaagcagtgggaattgacaaagacaagcccaaggaggcggtcaccgtggccgtgaagatgttgaaagatgatgccacagagaaagacctttctgatctggtgtcagagatggagatgatgaagatgattgggaaacacaagaatatcataaatcttcttggagcctgcacacaggatgggcctctctatgtcatagttgagtatgcctctaaaggcaacctccgagaatacctccgagcccggaggccacccgggatggagtactcctatgacattaaccgtgttcctgaggagcagatgaccttcaaggacttggtgtcatgcacctaccagctggccagaggcatggagtacttggcttcccaaaaatgtattcatcgagatttagcagccagaaatgttttggtaacagaaaacaatgtgatgaaaatagcagactttggactcgccagagatatcaacaatatagactattacaaaaagaccaccaatgggcggcttccagtcaagtggatggctccagaagccctgtttgatagagtatacactcatcagagtgatgtctggtccttcggggtgttaatgtgggagatcttcactttagggggctcgccctacccagggattcccgtggaggaactttttaagctgctgaaggaaggacacagaatggataagccagccaactgcaccaacgaactgtacatgatgatgagggactgttggcatgcagtgccctcccagagaccaacgttcaagcagttggtagaagacttggatcgaattctcactctcacaaccaatgaggaatacttggacctcagccaacctctcgaacagtattcacctagttaccctgacacaagaagttcttgttcttcaggagatgattctgttttttctccagaccccatgccttacgaaccatgccttcctcagtatccacacataaacggcagtgttaaaacatgaatgactgtgtctgcctgtccccaaacaggacagcactgggaacctagctacactgagcagggagaccatgcctcccagagcttgttgtctccacttgtatatatggatcagaggagtaaataattggaaaagtaatcagcatatgtgtaaagatttatacagttgaaaacttgtaatcttccccaggaggagaagaaggtttctggagcagtggactgccacaagccaccatgtaacccctctcacctgccgtgcgttctggctgtggaccagtaggactcaaggtggacgtgcgttctgccttccttgttaattttgtaataattggagaagatttatgtcagcacacacttacagagcacaaatgcagtatataggtgctggatgtatgtaaatatattcaaattatgtataaatatatattatatatttacaaggagttattttttgtattgattttaaatggatgtcccaatgcacctagaaaattggtctctctttttttaatagctatttgctaaatgctgttcttacacataatttcttaattttcaccgagcagaggtggaaaaatacttttgctttcagggaaaatggtataacgttaatttattaataaattggtaatatacaaaacaa

SEQ ID NO: 172 - DNA, 254 bp, Homo sapiens
ctccccacagttcacagtgacctttgagagtgacaaattcaaggtgaagctgccagatgggcacgagctgacttttcccaacaggctgggtcacagccacctgagctacctgagcgtaaggggcgggttcaacatgtcctctttcaagttaaaagaataaaagacttccagccgagattctctgtcctggttcttcttccgagtcacaccaggatcaacagagcttgggtgtgttcccctatccctacctgcag

SEQ ID NO: 173 - DNA, 1763 bp, Homo sapiens
ggggtacctcatgtgacaagttccaatttcttttcaagtcaattgaactgaaatctccttgttgctttgaaatcttagaagagagcccactaattcaaggactcttactgtaggagcaactgctggttctatcacaatgaaacggctggtttgtgtgctcttggtgtgctcctctgcagtggcacagttgcataaagatcctaccctggatcaccactggcatctctggaagaaaacctatggcaaacaatacaaggaaaagaatgaagaagcagtacgacgtctcatctgggaaaagaatctaaagtttgtgatgcttcacaacctggagcattcaatgggaatgcactcatacgatctgggcatgaaccacctgggagacatgaccagtgaagaagtgatgtctttgatgagttccctgagagttcccagccagtggcagagaaatatcacatataagtcaaaccctaatcggatattgcctgattctgtggactggagagagaaagggtgtgttactgaagtgaaatatcaaggttcttgtggtgcttgctgggctttcagtgctgtgggggccctggaagcacagctgaagctgaaaacaggaaagctggtgtctctcagtgcccagaacctggtggattgctcaactgaaaaatatggaaacaaaggctgcaatggtggcttcatgacaacggctttccagtacatcattgataacaagggcatcgactcagacgcttcctatccctacaaagccatggatctgaaatgtcaatatgactcaaaatatcgtgctgccacatgttcaaagtacactgaacttccttatggcagagaagatgtcctgaaagaagctgtggccaataaaggcccagtgtctgttggtgtagatgcgcgtcatccttctttcttcctctacagaagtggtgtctactatgaaccatcctgtactcagaatgtgaatcatggtgtacttgtggttggctatggtgatcttaatgggaaagaatactggcttgtgaaaaacagctggggccacaactttggtgaagaaggatatattcggatggcaagaaataaaggaaatcattgtgggattgctagctttccctcttacccagaaatctagaggatctctcctttttataacaaatcaatgaaatatgaagcactttctcttaacttaatttttcctgctgtatccagaagaaataattgtgtcatgattaatgtgtatttactgtactaattagaaaatatagtttgaggccgggcacgtggctcacgcgtaatcccgttacttgggaggccaaggcaggcattatcaatcttgaggccaggagttaaagagcagcctggctaacatggtgaaaccccatctctactaaaaatacaaaaaattagccgagcacggtggtgcatgcctgtaatcccagctacttgggaggctgaggcacgagattccttgaacccaagaggttgaggctatgttgagctgagatcacaccactgtactccagcctggatgacagagtggagactctgtttcaaaaaaacagaaaagaaaatatagtttgattcttcatttttttaaatttgcaaatctcaggataaagtttgctaagtaaattagtaatgtactatagatataactgtacaaaaattgttcaacctaaaacaatctgtaattgcttattgttttattgtcccgaattcagttggtttaatatattgtcctctgtaatttcgatccttcttaa

SEQ ID NO: 174 - DNA, 571 bp, Homo sapiens
tcgctgccatgaatgccttcctgctcttcgcactgtgcctccttggggcctgggccgccttggcaggaggggtcaccgtgcaggatggaaatttctccttttctctggagtcagtgaagaagctcaaagacctccaggagccccaggagcccagggttgggaaactcaggaactttgcacccatccctggtgaacctgtggttcccatcctctgtagcaacccgaactttccagaagaactcaagcctctctgcaaggagcccaatgcccaggagatacttcagaggctggaggaaatcgctgaggacccgggcacatgtgaaatctgtgcctacgctgcctgtaccggatgctaggggggcttgcccactgcctgcctcccctccgcagcagggaagctcttttctcctgcagaaagggccacccatgatactccactcccagcagctcaacctaccctggtccagtcgggaggagcagcccggggaggaactgggtgactggaggcctcgccccaacactgtccttccctgccacttcaacccccagctaataaaccagattccagagt

SEQ ID NO: 175 - DNA, 472 bp, Homo sapiens
  misc_feature (1)...(472): n=a,t,g or c
ggtatcttaacttttattaatgttggntatcacggttaattaatttaaaatgggaaaataattcaagttgttagttgaaagaattagacaccagtgttttggtatcttaacttttattaatgttggttatcacggttaattaatttaaaattgtggtttattaatattttaagttactctcatattatattttattaattttttcttatttaaaaagcttgtctctgccacttcctgtgtgacctgggcaagtcattttacctctaagagcctcaaatttcctcatctataaagtggaaatataaatacaaagcttgcagaaatgtcaggaaaataaataaattaaatgccaaatagtcaatgagggatattaggcaaaggccagttttggtgggcattttaacctatggagactcagtgcctctgtgtgtcccattatcacctccaagacatcctggcaacaccaccgctg

SEQ ID NO: 176 - DNA, 412 bp, Homo sapiens
  misc_feature (1)...(412): n=a,t,g or c
gattttcaggttttatttgcctgttataattctgatattatgtacatatatatatatacttttgtttttttgtagagggcttatcagtagaccaagcacaggcatacagggaggctgtggctgctgagcagtgctgggagaaccaatctttcctttttttttgtctgtttttatttttcctgggatgggttcatcaaagctaattgctatcaatcctagaaaccacctagggactcagacatctgcctacacactagtggcgtaaagggaaggacaggggtacaaactttcaaagtcacggtgtatttacattcccaaggtgggggcgggaggaggctgaggaagacaactgttcagacgataggggagggcagggctgctaaggggtcctggggggttggggttcttcngg

SEQ ID NO: 177 - DNA, 490 bp, Homo sapiens
tttttttttttttttttttacagagtgggaaacaactttaatgagaaacccagtttcccagtttccctttcatttcaagactatgacattccgacttctttgagggcttccattgcctaggtggcctttttcttgtagttaggcattcttagagctctgggcatgggcttgtcttggccaaaatgtcttttagcaaagtaatcatatatgccaataggaaatagtgagcaaggcagatccacaagtaagcgcctttccctggcgtgtaataggcaaaagggctcttcgccaagatagcatgctggatgtcccgcagcaccggagagaagtccttgctggctaacgagttgatcaataggaggaaattccgctgtgctaagatgtagtcctggccgtagtcttcctgtacctcagcggggaggtggtccagaatgtccttctccagcttttcccacttgtcactggtgcctgcgatatttgttaagaagcc

SEQ ID NO: 178 - DNA, 445 bp, Homo sapiens
aaattttcttgattttaaaaaatgtatttgtgttttgcaggttggaacgcaaacccagtctggccacgtcccgtgaagttgtggacaaaatgtttcagtttctgttcacctctgtgcgtgtgtgtgtatgtgttgtgtgcatgtgtgtgtgtgtgtgggggtgggggatggggtaggtatgtgcttttggctcatgtttgtgatgataactgaagtcttttgtgggtccgacctgttgtagggtgtgggggaaagtgaaggaagagaatgaaggtgagtccccgccgttgcaaaccttcaccaaaccacgcggcccagttttcgtgagtacccctgtgtcccagagaggaggacccagcgtcctcggctctgcgcaaggctttcttggtctggtgggtactcgaggcagttgagaaccttgctgagctgagcgggcacctcgcct

SEQ ID NO: 179 - DNA, 474 bp, Homo sapiens
  misc_feature (1)...(474): n=a,t,g or c
ctggttcagattttttttttttaagatgtatccaataacactcacgaagtaattaaaagccactttaaccctgctagtcaaatagctattttatcaaagatgtgtgcatacagatgtatatatatatacacacacacacacagtactgtacagaaacaaacatatgcatacctactatgaacggccaaggcaagggggatgatggcaacttgactagattctgagaactgctatttgtccacagatagcatgtcaatgttgggatgggttggggagtgagcgtaggctaagaaaaaaagagatgaagtgactatgtgcttttctttaaacttagtagttacagacatagtacaggactctactnaataattagtagagatcatngaaagtctggttggatattgaccatgagaccaacagagtgaccactattacttaatgcaacattttggaaagtcnacaactgatgggaaa

SEQ ID NO: 180 - DNA, 510 bp, Homo sapiens
  misc_feature (1)...(510): n=a,t,g or c
cactttataagtttattagtttacaaacgattgcaacatcccgttaataaaatggaaacgtaagatgacttagtattttaaataacttgaagctctgtactgtggctcttgttcataagaaacactgaaccaacaagcagcagattcagcccagccaagactctgatgccccagtggaaatcactactcacaagccttaattgatacagttttacactgntttgcccaaganntgtacnataccaactcanttaagagtattntcttcaggaaacaattcatatcttcacatagtcattaaaaagtttaacaatttaatgagtaggtttccctatcacattttggcaatatcataaaatggttttagacatgaaagagctattatggatttagaaggccttaaatttcctaaaccaatattgaacatcgattaaaccnggtattggctgtaaatgggacaatatattggccaatccctggtaaccctggggccccaatataggnaagtta

SEQ ID NO: 181 - DNA, 589 bp, Homo sapiens
  misc_feature (1)...(589): n=a,t,g or c
atagctacatactttattcaaataccactgggaggcaaggggtaagaggcaagggcagaatgtacaggtcaggattctagtgtcttcagcctgccgacagcaacctgggtgctgggccctgtgtctcctggagccaagggttagggcctgagcagctgtcactctctgggaagcccagggagtggggctgactgagcaggggccatagagcctagtaagggaagagggagctggcaaggagcccagggagggaggctctgtgaattgtctctgattcctttcctggagcccctgcctcgtcacctcctgggatgcgtctcaaggtcatggaggttgtagtggaggaggactgggggctgtttctcagacaaagaatgaggttattggcacagaattggatcagggggcctctgtgcaactccttcctgccttcagaaagggagggggcattnaagggatgagaactccactaagtccctcgaancccccaatccccaatgaggctcctcaaagctactctcagccctgagtgggagacacggccagctctgggcaagtctctgggtggctagccttagcactgtggcaa

SEQ ID NO: 182 - DNA, 465 bp, Homo sapiens
  misc_feature (1)...(465): n=a,t,g or c
gagggtttttactttttatttggaaataagacatggaagttgcaaagatagactactcctatgtattcctccaactttccccaatgataatatctcacacaaccatagattatcaaaaccagaaaactgaccaggcacagtggtgtgcacttatagtcccagctactcaggtggctgaggtgggaagatcccttgagttcaggagttcaaggccagcctgggcaacacagtgagaccctggctctataaacaaaaatggnagaaaaccagaaaactggtgtcatcaattgtgtttaaggaaaccgaggctcctttaaaagtttgttataaaattatagatatctcctaaatattgaggtggaaagattcccctgggaagcagcctagtccagaaagttgaagacagtgacatcccagataggttaatacttctggccagcaccataattacacccctccttnggt

SEQ ID NO: 183 - DNA, 442 bp, Homo sapiens
ttttttgttctcaaatattttttaataaatagacgaaaccacgaaaccactagactgatggcagcaaactaaggtcagatgagaggggaaactagagaaggagcagcctgagtcagtgacacaacctcctccccgaccctctaggttaaggcacttccggggaggcaggtccttggggtcctgttacacagggtgaatgggagaggaagggattaggatcccttctccccacctttgcatcaggacacccctgcccttctcaccctaccccatggccctgtccctgatttacccactctcatctcacagcactctaaggggaagtttgggtgggaggagttcttgtgggtgggagaggtctgtgcccctgaggaagccgatcctgccaaatcttgatgcgacaccagcagcccactctaccctcttcatcccaaggagccat

SEQ ID NO: 184 - DNA, 437 bp, Homo sapiens
  misc_feature (1)...(437): n=a,t,g or c
tcaagagattagaaaaattttattcatcatcccaaactggattatatattacaaattctgatgaaaataatattaaaggtattttcaagtagtaccacaaactatctgtacctgaagataaaaccacacagtaaactggtaagtacacattgaatcaattcatctttaaaatatcactttgtttagaaattcatatatatgtttttgtagttatgaagtgggagggacacacaaatagctacataagattttcatttaacaaacatatgaactattccccatgctttgaatgaatcatcagaaggctgtaaaatcctgttatttttttcaaaggtgcatgaaacaatatttcatttccaatagcaaaaatacagtacttctaattttccttatattctctttcaaccctactgtgagagctggcttataattatatn

SEQ ID NO: 185 - DNA, 316 bp, Homo sapiens
aacagaaaaccggcaattgttatttattttaaataagaagtcataatactattaggaatagagagcaagatataaaatcatatcaacccttttagataaatacaaaggacaaatgaaatacacaaaaaacaatatattttaaaaatccactgttagtttttaggaaaaagatttagcagtttccattaagcactacatcccactattccatttttaggaaggacagatgcttgaggccataggttaccagctcttgtttggtctttaaaaatgcaagtaagttgctaacattttcaaataagatttcaacataact

SEQ ID NO: 186 - DNA, 207 bp, Homo sapiens
  misc_feature (1)...(207): n=a,t,g or c
ttttgagatcatctactcaaagtttattggactgaacagatacaaaatatggagcagaaaggaaaacccactggggaggtagaggaaatgacagagaaaccagaaatgacagcagaggagaagcaaacattactaaagaggagattgcttgcagagaaactcaaagaagaagttattaatnagtaataattaagaacaatttaacaa

SEQ ID NO: 187 - DNA, 687 bp, Homo sapiens
  misc_feature (1)...(687): n=a,t,g or c
tgcaaaccaaaccaaatcattttattgtgcaatttccttctaccagaaaattactaaaaatataaatattaactctctaaaaaatactcagaatagatctgtaatcttcctcctcctcctcagaactggagccaatcttcttctttaaacctgatggattgcatacatgtatgtcttccatatcagccacatacacaacattcagatacacttccgtctgtgcagggggatacaccagcctcctgccaggttctggaagctcaccttataatctaccaggataaagctgtgtgctgagtaggaggttatggtggggttggggagtaacaaggagataaaagaccttgtggtcccaacttccttatgtggacagagaagataggtcctttactcctcctcattaccctgncctctcatggactgggctaactgaaggccaagctcccagagaagctggactcactgtgcgggattactgagggtgtggctgccaggctacagtcacaggaaggncagactgttgagatggacatggaaaccaggtgaggctttggatggnaagctggtctggggcaaagctctgcaggatgagtagtagctgttccggcgggntttgggnagccccagaccctagcaccaggtactatgtgcagcatctaagaccagnaccagtctccaagagccccc

SEQ ID NO: 188 - DNA, 587 bp, Homo sapiens
  misc_feature (1)...(587): n=a,t,g or c
tcaaataatccatctaacagccatgagaccactcaagtatttgaggtcatcagctgcgtccatcaagacatgatattgaacatggacaccatctggtctgttggtctgtttttgttggcaaaggactccaaaaggatgcagttgtatgtgtttcagctgaaccacataccatagctcctctcccctcacaaaagggtttctctggggggagaaaagtaactgattatacctctcatgtctcaaactgaaattctgagaagcaaatggtcagttgagggccccattccagatctgccgggacgtcctcagatgtccagagctggcaaaaggtggagcaggcagcagctttgggcaccagcctgtctctttctgttctgataaggccacacacatggctttttgtgataagcttccagcccatgccactgaaataacgtttaagaacctggctgcatttcacagaaatagcgtaatgggaaatcattatgtaattaaacaaagcatgaagctcattatccttttccttttaacaaaccttcaatttcacattttagtggacactgtggnttccagagaatatatggatt

SEQ ID NO: 189 - DNA, 469 bp, Homo sapiens
atgtaaaactgacttttattacaattaaaaaagaacaaagacaatttgataagtgcctttaattacaacatacctgctatttacatgtaatcatacttttatatatagcttgaataagttttattacatgtaaactataagatattacaagttaaactccagtcttttctggatattcaattgaaatactactggcagaaacatacagaaaacaaatacccatttcagttcctcaggtaccattactggttgaatgatcaagatctggccacagaagagaagtggaaatatgcatcaaaacaaaacttattcttaacatgactaacagtattgttatttaaaccctaaacataattaataattggatcattaaaaacacaacttcaatttatatagcacctttcttccgaagagttgaaagcattcgtgcttatctctattatttcgtttgtccccataacatctctat

SEQ ID NO: 190 - DNA, 458 bp, Homo sapiens
tccgagataagaattcacttttatttttccagaattaataggaatgtcattgtgctttgaagaataaacaaggaaaagaatgataaaagagttggaaaaatgagcaggggtcatgccaagtaagaatgtgtacgatatggtaggtgtcattggtatgttataaaatgtattatgaaaatattttgatgatatttcaaaagggaaataatgctacctaatgataatatgaaaaaacgactctggctgctgtagggagaaaatataggcttggagttgggagaagagtgaaaagaaggccagttggagacaattatactacatttagctttaggaaggtgctgaaggagtcatggattgagattgttttccaagttttcagttgaacaatttcaatatggtggcattacttaatgacatagggaggccagagaacaaacagatttggaaggatgtggtag

SEQ ID NO: 191 - DNA, 476 bp, Homo sapiens
  misc_feature (1)...(476): n=a,t,g or c
ttnggagttacttaagagttttacttattgctgttcttaaattccttcccctaccacttcctcttgggcttttttatttctcttgttgatcaatctcttttttgtgatacttttcattgaatcatctcgactcctttatcccatcctttactcgactcaaactccttatgctgaacttttcaatccaaaatttctattgttttaggactctgggaagcagttgataaaaagataacacgagctactgatatggtcaggagatgttttctaaacaaattgtagaaatataaacatgaaatgtggcaatgatccctttaattagatcattgagcaataaaggatatgaaccattagtataaatattcaattcagtctttccggattgtgttgttagataagaatacatccaaaaagggccacagatcgagggagaaaccaaggaggggtgaggtcatgggttgagtgtaattggttct

SEQ ID NO: 192 - DNA, 582 bp, Homo sapiens
  misc_feature (1)...(582): n=a,t,g or c
tttttttttaagtacttatttttctttatttttatttattttctttttgggtgacatataacttaagtgtggtaaagtatataaagggcacagatcttaagtgtaccaggtaatgaattttcacaaatttatgcatccatggtaaccgctaatcagagaacatttccagcacccagacgtcttccttgtgctctttccctgtcaattcccctgctccagaagcaaccacccatctaatgcctttcaaaaacaggcacagagattcgttgtgtctgtttttgaacttcatgcgaatgaaatcttacagcatgtcttccgtgtgtctggcatctttagctctttatgtctggcaaagtcttttatgtcattctatgtagcaggagtttagaaccaactttatgggccgggcttggtggctcacatctgtaatcccagcactttggggaggcggaagcagaaggcaggcagaacacgtgaggctagggagttccgagaccagcctgggccaacataatggaanccccatctcnactaaaaattcaaaaaattagcgggcntgggtggaaggtgcaaccggtaacc

SEQ ID NO: 193 - DNA, 413 bp, Homo sapiens
  misc_feature (1)...(413): n=a,t,g or c
aagagttgcatattttactttatttttattaaattaaaagctacagtctggcagcgattccagaacagggtaaggaggttcctcacaggggtcagagaagagcggagaaagacagactgacggagactgagacacaggagagaaaggacaaggttaagggagaactgtatctgatgaacacacacagccggctccatggcgggtgacggggagctcacatcagcccaatttctcctccccggcacccgaagttcagcggtggagcagtatgtgggggcggttaggaatcaagagaccctcccttccccaccctaggtccttntctcggcttggtcgtggagcacagcacattaccagaaaaagncaagggcaattgangggcagggaaaccgggagnatattntacacgggga

SEQ ID NO: 194 - DNA, 455 bp, Homo sapiens
cttcatcaatatttattgggcgcctattatgtgcaaggccttacactaggcgctggggaagatacaaagataaatctgacagactgccctcaaagagcttacagtctagtataggagcatacagtctctggagaagatattttaagtgtaactaacctcccccatcccacccccacaaaaaaaaagaaaaaacctactagacttggtttcttccatttacttttagtttagcagcttcacgtaaaaagcataaatctgaaagtcttttaaaatgcatacttttactggtaaacaaaattcattttcattagaaaaaatgctgaatatttattgcaattaagaaaaatcttcagccgggcacggtgggctcacacctgttatcctaacactttgggaggccgaggcaggtggatcacttgaggtcaggagtttgagaccagcctggccaacataag

SEQ ID NO: 195 - DNA, 444 bp, Homo sapiens
  misc_feature (1)...(444): n=a,t,g or c
ggcagtttttcctgtttattatatagttattctaaggtggtaagtgtcacaaagttaacttcaagaggaataacatggtccagtgtgaaacacaaggtacaacattttacaatgaaaccacagcacaaagtaactgaactttcaaaattgggtagttcaatgaaacattttgtcaacccttagctctataaagctctgctgatggacttagttgatggatttaaaaaatatattgctgtgtcaaatgttttaacacaaaatgtttttttttaaagagaatacacatccaatcaactgaaactgtgagcagaaagtatgtaacctctttataaaaaccgttatccaaatttacaacattcataatatatttcaaagtanagagttcttagaaaaataaactcaattccttgcttactgatgagtatcaactcctcaaaacacatc

SEQ ID NO: 196 - DNA, 450 bp, Homo sapiens
  misc_feature (1)...(450): n=a,t,g or c
aataccattttgagagtaattttaaagactaatgcgaaagttcgggagcacattgtatatttgaaataagtgtagtgtgtgcaaagaccattttctacctgtggataaaaatcaattcccccaaaggcctaaaagcatgaacaatgtttattttcgagtaaataattaaactacatatttaacatggaaaaaattaaatgaatgtcaaaaccaaaattaagaactataagcaaagcatgcagtctctgttaacaaaacttagttgtgaaactacatttttcattttgtaaatgccattatttcatttcataaaatggtaaaaatcctcagtatcattctttacacttgatgcggcaaacacttcctttccctattttcctcggnatttcctgcaaaataaatctaccatctcaagttccntaatggttcatactttcttctcaacatatt

SEQ ID NO: 197 - DNA, 447 bp, Homo sapiens
atcaatcatatttctgtcatctccaacctaagatattttttagattgtctccctattctttgattcaaaagccaattacagaaactatgaacttgacctaattctggtttttgacaattatgagacagaaataaagaaatcgcaagcagttcttttctttgcacactgaccattttttaattacatcatcctctatgatgatggtgctttcacaactgcagctctcctgtatgtcaaaatcattctggtttccaggtaaatggacaaaggagatttgccttcagtgtctagaaggcaatttacttttcagctgccttaattacctatagtttaaagaaaggaatgccacatatagggtcctttaaacatctaaaatggggaggttggcctccaaggggcaccattcccaaacatttgatttcaagtcccagaagcctttcatatatg

SEQ ID NO: 198 - DNA, 288 bp, Homo sapiens
  misc_feature (1)...(288): n=a,t,g or c
gcaacaaaagaaactatttatttggaatatgcattaccagtacaaattaggagactgtaaaacctacaccgtgttagtatcattagagaacacaaaagttcagttggaatcaaaagggacagaagcctgtgctctcacagaagcagaaaagcttaaactttcaaaaccaaaacagagcagagtttgcaggtttatattctgaataataagaaatggggnggggtagggggagaataaaaccaacaaccaaaggaaagcatttcaaattgaaaatgccaaaggaaagaa

SEQ ID NO: 199 - DNA, 318 bp, Homo sapiens
ttttttttttttttttttttttatttttccataaaaatgtaattttaatgatacagaaatagtatatgtacatttctttccacagcagcacttcattcatctctaaaaaatttaacaaaattaaggctaaatcagagcgagctgataggaaggggtattctatgtggtggtcttcttaaagaatgttctcataaatataggatgttctgcagacaagaaataaaaataaaacatgctgaacaagataccaaaaatgggaaatgcagtagaaaatgagcccctttctaccaatctactaagaatcccaactcccctggg

SEQ ID NO: 200 - DNA, 231 bp, Homo sapiens
tctatttagatcggattttattttgcaatatttattatatattcaattcaaatgtactcactattgtgctaggcaattgaaagtaaaaagtataaagctgcattttgcgctctcagtgaggtttaagtcagggaaatgaggcatgcacacaaaataacgagaaagtagtataatagctgtgatcattagttatcaaaataagtgaatgagctaataatcattgttagaata

SEQ ID NO: 201 - DNA, 460 bp, Homo sapiens
taacagaaaaaagtcaaatgacaattttaatagactttaaaacagtgtacaagtaaaaaacactggttttgtatttcaaaagttgaaggaagatatccagtcattaaacagtctacaaaacatatgccagtaaattacataaaagactatgtacaatataaaaagagctgaaaacagtcttcactgtaaaaataatttaaaacaaacttttcaatttaaaatatcatctatagcacacaaacatcatgcaaatggaaaactaaatatactgcattctttagtgtagccaaataaattcagattgagacatcttataagtaagggaaatggccattcaatacgatttttttctctggcagtaatggtcctagctgggtgttttatgcataaagaacagctatatttcaaaccctttttattgtaataaatactaaagcaacagaggaatactttattaatt

SEQ ID NO: 202 - DNA, 440 bp, Homo sapiens
  misc_feature (1)...(440): n=a,t,g or c
gtttattaaaccagatttattctccacaagctgaagatacctgaggttacatgaggactggcattaaataatttataaatgtatttttgactgacagacttttatcataaggattcatgtgtttacaaaagcaaaatccaacctctccagagctagaaagtgggaaggtgcccgggctgcaacacagccttgggggaggatgaggccacataattctctctgcccacactctcagaatgccccaagaagttagtagctacacaaagccaagccttgggggaaaacctggtccgtggtgtggactctccaaaatgcagacccaaccggangccgggcccgcctttccatctggaggcactgcagggcttctgaaagcggcccatcccaggagcctggcaaacacccccagagaccctcaggatgcgcagccccggggcttt

SEQ ID NO: 203 - DNA, 210 bp, Homo sapiens
aaagtaaaggatttattgtaatctgcttacagtcctttgcaaagacagacatatgtttttgcataaagatataaattgcttcattttaaactaatttagtgtttttttaaattatatgaacttttggtgaattatgaactgtaccaaaccaagatttttaagagcaatatggtacaaaaataagagcagacagacaatttggactgggac

SEQ ID NO: 204 - DNA, 529 bp, Homo sapiens
  misc_feature (1)...(529): n=a,t,g or c
ttttttgactagaaagggagcactttaatgaacagaagtacagacgtgctggcaaggatggaaatctccactggttcctggcccccttcacctccatgcatccccagcatgggtgttaatcattacccaagctctcgctgttccccctcaccccctgcagagtccagcaggtctagatacgtgctctttgaaatgtgttctgggattaaaaatggtgccctgaggctgtctaaccctcacaaaagacagacacatgcacacacgggccttggggagggctgtgtattagcagtcaggtgggccctcctgggagagcttgctcaagaactcttctcggaaggaaacccaccttaaggtagggttctgataggcagantcccagagggacagccagctgctagaagatggggttatccagggtttgtaaggtttaaacaacgggcagggagncaaacgagtcaaatggtttcctcgtgcgaattttggctcgaggcaaattcctatagtgagngtattaaatcgtaacatg

SEQ ID NO: 205 - DNA, 445 bp, Homo sapiens
  misc_feature (1)...(445): n=a,t,g or c
ttttcattactgagaggacgctttatttccttgtgcaaaagagcatttcaagtcaaggtagtcagtcacacttgggcgagtccggctcacataggaactgggggtagaagaggtactttaagttgtactcagtttgggctaagcagttagcaatctcctggtcacacttgcacaacagttcttggcatttgttctctgccggtccgcacaggacgctctgattgacgcactgccaggagtagcgctctgtcttggggctgcagcggcctcctcagctcgagtgtaacaacagtcgtggccatggcagcaccagtcaatggcatcgcggggctggccatggcctcccaagccacaaaagcaaccatatttcatataggcgatgggggttcggggaccaacacaacccccagttcctgccagtttccaggatcccangccggtggnt

SEQ ID NO: 206 - DNA, 197 bp, Homo sapiens
tttttttttttttttgttatatacattttattgaaaaaaaattttacaacaaaatattttggcaaactgtaaaagtatacataagtgcaaatatatcctccttttaaaatacaagcaaagtgtgagtatacacggtcataaaaatatctttaaaatatggtggtagaaaacaaccttgtaaaaacgttgtattgtcc

SEQ ID NO: 207 - DNA, 413 bp, Homo sapiens
  misc_feature (1)...(413): n=a,t,g or c
ttcttttagctgccagaactttgttaaccacctgggaccgtggacatcttctctcgtgtcttgagccctcatccccacccctccaagccctcatgcccaccacaccgtgtcccacattccccatcctcccctgtctgctccccatctcaagtccaattccaaggccagagccctggcagcttttctgggagacagcatgaaaaggaggggagtggagatggcagagatggggtggagccagtgcgctgtgggtcctgttggcgtggtgatgtgggggccaatcctgaggccagaggttcatcaccgtgatctggaagcccacggggcccctgggtagaaacttgggaagaacaaagggggaaaagaaaccagaacaggaagaagacgagtaagcnttccgagtttcacgagat

SEQ ID NO: 208 - DNA, 256 bp, Homo sapiens
  misc_feature (1)...(256): n=a,t,g or c
tctgatanctatgtgaaaattcttttcaaagtaggtaaaagccatcactatatttcaaagaggtcacagtgacatcatatacaaaaggaaccagattgaaaaagatattgctgacatagccagtagtgagattactaaagantaaacagaaatgccttgggaaattatttttacaccggcttgaattgaaacattaaagcaaaatgaaagctgtaaggngttcactagttttcccaaatgcgttgtcaagtttatt

SEQ ID NO: 209 - DNA, 331 bp, Homo sapiens
  misc_feature (1)...(331): n=a,t,g or c
ttttnttaggngcaacaatcaagctctatttttgtaattaaaaatgtatccaaagggaaaaaagaaacaaaaggaacaatatttgtactctatgttgctgcagagagcagaactgcggagggggtgctagtcccaaggggtggactgtgctgtgctagtgccctaaatcctgcaagcgcggggttgggggggcgggggagaccgctgtcgggggtcgtgagttccgggcccttgtgtgcatgttcacgtcctgtcattcttgcccccagctgagagagcagtagaggaaaggcactacatccaccagcctttgcattctcctcggagcaca

SEQ ID NO: 210 - DNA, 410 bp, Homo sapiens
  misc_feature (1)...(410): n=a,t,g or c
ctttaatgttagtgacagttctatacagcacagacataactgaagaaacacattactttgatttgggtttatgtattgtacttttaatcacttactgagaatatttcaaatttatattctcatcaggaaaatgtaaaaaagatactgatatatattctatgatttttatgccacaaacacccctgttatgagatcatttaatagggaaaacaattatactgacatctcttgttccnattttccccattaggatatataccatacaacttcaaggataggttttaaaaataatccattcagggttattcntaaaattttgcccnataaaattnggccaaggtatggcccttctggttaattgcctaaaccccaatatttccacccatataaaggcntggtggaccnccatt

SEQ ID NO: 211 - DNA, 349 bp, Homo sapiens
  misc_feature (1)...(349): n=a,t,g or c
ttggccaggctggtgtcacaactcttgacctcaagtganctaccacccttggcctcccaaagtgctgggattataggcgtgacacntgttgcccggccaacattaatatttttaattagctactacagcttagagtagctgctatgggagtgtggcctttttgattaaatactagctgatcaaccctagaatataaatncttgttttataacatttagatttaaataacaatanggaatgtaaggcnccatgaagggcaaggaatgcctttttgttttgttcactgctggggtctaaaataatgccggggctcaaatatttgttggantgaggtaaatatggctggact

SEQ ID NO: 212 - DNA, 355 bp, Homo sapiens
  misc_feature (1)...(355): n=a,t,g or c
aagttttctananttttaatgaagccaataaggcatataaattgtgttctggcagacattaagacatgctttctcttaccaaagaaaatggcacgttttatcaaaatttgacaattcagagtaaagggtactgagattaagcttcagagcaccaacttaaacaaaacaaccaaaaaattgttatccaacgtgggaaagagggagcaaggaaccaagggcataaagggggaattaaatatgtgttccntcccatctccaaaatccttttaggggaatagggagttctgggccncttgtgaggccaccacattgcaccccccaacccccattcccaggatcttaaattttcgggntg

SEQ ID NO: 213 - DNA, 385 bp, Homo sapiens
  misc_feature (1)...(385): n=a,t,g or c
tttttttttttttgagattgaaaccagacatacttattttaatcatattttatataaaatagacatttacataaatttaattttggaaagacctaggcaaagtatacatcattagactcaatgggagaaatactttatggaagataaattctaacgggcacagccaaagtaacaaaaatgtacatttacatacaactgatccaaacaggaagtaaaagcnttntggaaaaanggancatgttgcaantcatttccccctggacaaanggagggntctgcgtgatttacaggcaattcaattgttttccacntttttaaaggcaagcctggcttctacaggtattttanttccttgggggggagtttcacctcntcttttttcccc

SEQ ID NO: 214 - DNA, 294 bp, Homo sapiens
  misc_feature (1)...(294): n=a,t,g or c
taganaattnnctgtaggtgttcctttattttatcaaaaatagtaattttgtataattntaaatcaggaaatctaaggggacatgttacccaatcacaacagctaataaaatgcctcccattacagacccagctttttaaatattcaataacattcacagaattggcaagttagtctccaaaaaattctaacagaaactgcaactcaaaaagtgtgtctatatcagagatggtggtaacttcctcaaagaagttacatgcaaatncccaggggtctcatggtttacaaggtgac

SEQ ID NO: 215 - DNA, 368 bp, Homo sapiens
  misc_feature (1)...(368): n=a,t,g or c
taagagataaaattattttattggttcaaataaactgaaaaaaatagacatacaaatcacttagttgtaattttaaagaattcctcaaactaaacttgaatttaagcataagcttatgcttacagattactatttgctagcttactaattattatttgaattaagcagtaagaactaaaatttaagtttcttaggttttacagattgatttgaagggcatgctgtcttgctaatattgaaataaatttatttcttaaaaattattattttactggggttatgtcagaggcaggngctgtggttcttgagggnagggncaagtttcttctcagggatcntccaaaatgaaggctctcaccgttctgccc

SEQ ID NO: 216 - DNA, 235 bp, Homo sapiens
gacttacaggggaactatatatgtatatgtatattttattaaacacccatctgcactatcagtattgcactaatgtggaatttgaaagactattttgctgatactgtatatatgcgcatcattcctgattagattgttgtaaagacaatctgaaagatctaaggttttaaaataatttggtttgaaaatatacagttgtcttgaaggaattgctgtgatacatgaaaaaaaaaaa

SEQ ID NO: 217 - DNA, 195 bp, Homo sapiens
  misc_feature (1)...(195): n=a,t,g or c
gccaagcaatcaagcaaaacacaagaccaatagaattagtagacagaagccttggggacaatggcagtgcccttcctgagtaagacatgaatgccatctggnggntccatttgaaactacagtgcagtaaccaaagancctaatgttttcaagcataaaggnacttttngtgaacaggtgggcaacacaggcagg

SEQ ID NO: 218 - DNA, 343 bp, Homo sapiens
taatggttaaggaggaaggtttattggcttcaattccccagttgatgttcaacactttatttagttctcatttggattttaaacatttgcttgacaaataatttcccatcaatttccatttctttggaaagctcccacgtgtaatttatttttaacatctctgaagagcagaattaatgatatttcctagctgttgctccagatcatgtagggtagaggaggctgaaaactgctacaagggaaggcatctgtattgtttcaaaacgtcaggacggtacgggatactctttccagagcgacgagggtcaaatcccttcatttatttttttcaaaagggtaaaac

SEQ ID NO: 219 - DNA, 312 bp, Homo sapiens
  misc_feature (1)...(312): n=a,t,g or c
tttttcggtagaagaacttttattgaacagtaagattcaagatttcaccagggtnagagggggaattgaaaattagtagaaaaattccaaggggaccagttagccacaacaaagaatggggttcagggaacttcttagggatgtatcttcccctcaatacaggtagaggagcagcatcagaagcagggctttggagagaggcatagaagagaatcaccttctcctggcccacgcaagctacctgggtgtacctntcaagttcagggccagcttcttgttccttccccgctcttggtagatgtaaaaggtttc

SEQ ID NO: 220 - DNA, 282 bp, Homo sapiens
  misc_feature (1)...(282): n=a,t,g or c
agactttattcaaagaccacgggggtacgggtgcaggaaggggaggaggggctggggggaggccaagnaangaagcatgncaccgaggtccagcttcacggtatttggaggtagcacggtgctcacagaaagcaggaacttgtccagggaggcgtcacccagggtgaactcggcggggaggtgggcgccagggtcaccagcaggcagtggcttaggagcttgaagttgaccgggtccacccaagcttgtgcgcgtnccaggtcntcagggngacangcgttg

SEQ ID NO: 221 - DNA, 493 bp, Homo sapiens
  misc_feature (1)...(493): n=a,t,g or c
tttccaagccaacatttattnttgcacaagcctgttgcagtcctgaggggatcttctggcanaggtntgggtaggagctgagtggccactggggtgaagggagacagaggaggctntgccagcaggntcctatccagatgatacatgagatggaggctcctcagccacactccagggagggtggggtggcaagggggattcagggataatggcattaataatacaagtggtaaacaaataaccaagaggntctggctggttacgntacacaaaanttagcagtaagagtccgtgctttcacattcctatcagacagatctgagttcaaatcctgtatgtntagcagggtgaggtatctgctttctttcagagcccatgggtgcacatctctgagcctagttacaacagttggcacataggtnggtgacaaggagggcagctctttgattcctgnttgcttccacagcacagagagttaagtatggctggtnta

SEQ ID NO: 222 - DNA, 305 bp, Homo sapiens
  misc_feature (1)...(305): n=a,t,g or c
ttaattatngatattccccctcaccgccctcagggancgggagaagtcacacgaccatagggagcttggacttggtggtcgtcacggtgctggcagacgagggtctttccaggaaccccttgctagaatcagccctcatacaagtgtgctcagagatcccaggagcgatggcatcctcccgaagtcactacccccatatgtctccttgggcttcttccccctctctttctggaacctgaccaggcagaacgcagcaactgncagcaacagcacgcccagggagcaccccaatcagagntccggcc

SEQ ID NO: 223 - DNA, 263 bp, Homo sapiens
  misc_feature (1)...(263): n=a,t,g or c
cactcaataattttaattgtcctaaccttcaatttcactgattcccttcttctgcctgccaaatctgcctctgaaaccctctattgaatttttcattttagttactgtacttttcagctccagaattccttttcattttcttttcaggntttctatctctttactgttatttccattttgttaatacattttgtcttgatgttccccacatactcctttaggggctttcaatgtctttaacacagntggttttaagggctttg

SEQ ID NO: 224 - DNA, 2263 bp, Homo sapiens
  misc_feature (1)...(2263): n=a,t,g or c
gagccggacgtgtgcgcgaagatggcgggccggagcatgcaagcggcaagatgtcctacagatgaattatctttaaccaattgttcagttgtgaatgaaaaggatttccagtctggccagcatgtgattgtgaggacctctcccaatcacaggtacacatttacactgaagacacatccatcggtggttccagggagcattgcattcagtttacctcagagaaaatgggctgggctttctattgggcaagaaatagaagtctccttatatacatttgacaaagccaaacagtgtattggcacaatgaccatcgagattgatttcctgcagaaaaaaagcaatgactccaacccttatgacaccgacaagatggcagcagaatttattcagcaattcaacaaccaggcctactcagtgggacaacagcttgtctttagcttcaatgaaaagctttttggcttactggtgaaggacattgaatccatggatcctagcatcctgaagggagagcctgcgacagggaaaaggcagaagattgaagtaggactggttgttggaaacagtcaagttgcatttgaaaaagcagaaaattcgtcacttaatcttattggcaaagctaaaaccaaggaaaatcgccaatcaattatcaatcctgactggaactttgaaaaaatgggaataggaggtctagacaaggaattttcagatattttccgacgagcatttgccttccgagtatttcctccagagattgtggagcagatgggttgtatacatgttaaaggcatcctgttatatggacccccaggttgtggtaagactctcttggctcgacagattggcaagatgttgaatgcaagagagcccaaagtggtcaatgggccagaaatccttaacaaatatgtgggagaatcagaggctaacattcgcaaactttttgctgatgctgaagaggagcaaaggaggcttggtgctaacagtggtttgcacatcatcatctttgatgaaattgatgccatctgcaagcagagagggagcatggctggtagcacgggagttcatgacactgttgtcaaccagttgctgtccaaaattgatggcgtggagcagctaaacaacatcctagtcattggaatgaccaatagaccagatctgatagatgaggctcttcttagacctggaagactggaagttaaaatggagataggcttgccagatgagaaaggccgactacagattcttcacatccacacagcaagaatgagagggcatcagttactctctgctgatgtagacattaaagaactggccgtggagaccaagaatttcagtggtgctgaattggagggtctggtgcgagcagcccagtccactgctatgaatagacacataaaggccagtactaaagtggaagtggacatggagaaagcagaaagcctgcaagtgacgagaggagacttccttgcttctttggagaatgatatcaaaccagcctttggcacaaaccaagaagattatgcaagttacattatgaacggtatcatcaaatggggtgacccagttactcgagttctagatgatggggagctgctggtgcagcagactaagaacagtgaccgcacaccattggtcagcgtgcttctggaaggccctcctcacagtgggaagactgctttagctgcaaaaattgcagaggaatccaacttcccgttcatcaagatctgttctcctgataaaatgattggcttttctgaaacagccaaatgtcaggccatgaagaagatctttgatgatgcgtacaaatcccagctcagttgtgtggttgtggatgacattgagagattgcttgattacgtccctattggccctcgattttcaaatcttgtattacaggctcttctcgttttactgaaaaaggcacctcctcagggccgcaagcttcttatcattgggaccactagccgcaaagatgtccttcaggagatggaaatgcttaacgctttcagcaccaccatccacgtgcccaacattgccacaggagagcagctgttggaagctttggagcttttgggcaacttaaaggataaggaacgcaccacaattgcacagcaagtcaaagggaagaaggtctggataggaatcaagaagttactaatgctgatcgagatgtccctacagatggatcctgaataccgtgtgagaaaattcttggccctcttaagagaagaaggagctagcccccttgattttgattgaaaatgaa

SEQ ID NO: 225 - DNA, 2895 bp, Homo sapiens
cgggctcgatcgcccgggagccaggactcggcgacgcgaggctgccgggctacccggccgaggcttcgggggcgcaaactaatgggactggctcgctcggcagcatctccccgctcttctaagtacactgagcagggcccgcgctgaagtagaagctgtccgggggcgcgtagcccggagtcccagtgtggcccggaggaacggagcccgtgccagggcggcccagtcgggagcccggggaccgagcttgtgctgtggggaaacccccacttcttccaagggacagcgatcccgggacggtcgaggcgtcggggcggtcaccgagacctctgcgggaagaccccgtcggggagagggcgcgcagccccgaagcgtctcgggaagtcgagcggaatcgggcgggatcacccgggggcgcagagcccccgtcgcgcctcgtgcggcagcggagagcccaggagaacgagccctcgggggccgaagcccatgcccgggttgggggcggctgcccagtgagtcctcctggccggccgggcggagaagagcgacaccgaagccggcgggaggggagcacttcaaggccggcggctgcggaggatgggcgcctgagcggctccgagcgcagcgcggcagaggaaggcgaggcgagctttggtgaggaggcgccaagggatcccgaagtgcagtctgcccccgggaagatggctcggcctgggcagcgttggctcggcaagtggcttgtggcgatggtcgtgtgggcgctgtgccggctcgccacaccgctggccaagaacctggagcccgtatcctggagctccctcaaccccaagttcctgagtgggaagggcttggtgatctatccgaaaattggagacaagctggacatcatctgcccccgagcagaagcagggcggccctatgagtactacaagctgtacctggtgcggcctgagcaggcagctgcctgtagcacagttctcgaccccaacgtgttggtcacctgcaataggccagagcaggaaatacgctttaccatcaagttccaggagttcagccccaactacatgggcctggagttcaagaagcaccatgattactacattacctcaacatccaatggaagcctggaggggctggaaaaccgggagggcggtgtgtgccgcacacgcaccatgaagatcatcatgaaggttgggcaagatcccaatgctgtgacgcctgagcagctgactaccagcaggcccagcaaggaggcagacaacactgtcaagatggccacacaggcccctggtagtcggggctccctgggtgactctgatggcaagcatgagactgtgaaccaggaagagaagagtggcccaggtgcaagtgggggcagcagcggggaccctgatggcttcttcaactccaaggtggcattgttcgcggctgtcggtgccggttgcgtcatcttcctgctcatcatcatcttcctgacggtcctactactgaagctacgcaagcggcaccgcaagcacacacagcagcgggcggctgccctctcgctcagtaccctggccagtcccaaggggggcagtggcacagcgggcaccgagcccagcgacatcatcattcccttacggactacagagaacaactactgcccccactatgagaaggtgagtggggactacgggcaccctgtctacatcgtccaagagatgccgccccagagcccggcgaacatctactacaaggtctgagtgcccggcacggcctcaggccccagggacagtcggcctggaccggacctctcctttcgcccccacaccccctccccttgccagctgtgcccacctttgtatttagttttgtagtttcttggcttttataatccccctttttccctgccccctgggcttcggaggggggtgcttgtgcccctaacccccatgctcttgtgccttccccctctggccaggcctctgggctccgtgggggcgccccttcttggaaggcagggctggacactgatggacagcaggcagggagacagtcccctggtcctgcccctccctcgccccccttgccaccttcccaggactgcttgtccgctatcatcactgtttttaatgcttttgtgttcattttttagctgtcaactcattttcatctgttttttgaagaaaaatggaaaaatgtaaaaggcagcccctccccaggctttgtgagcctggcccaagccagtacaagagggcctggggcacgatgtggtcagccaggaagcataggatgccatttcttttatagattccttggtatttctggtggggtaaggggcaggccagggctgttcacgcccatgagggaagaggaaagtgccactgggcaaggtgtcccaccctcccctcctgaccctcctacgaggcttatcctggcaatggggtagtcactgccacccttccacacacacacacacacacacacacacacacacaaaaatcccttccttgtgggattcttgggcatctcctgcctccctcactctcacggtaattaatgtcttaattggctgttgcctggggaacaggagagctgctgcaggcagatgacctcatggggggtggagggaggtgaggtgcccaggtgtctatttaccctgcagagctgggagtttcaccccaccccccaccctgttctctccttacctttggcatcctttggcctggtggggaaacagaggcccagggtggagacctaagcgggtataagaccaggtggcctgctccttttctgggccctagcacaggtgggtaacccccacccaacccagctcctgctgctgtcccagtcttgggctgggccctggaaagaggaagagcctgcctgggagcaggtcgtctcgttccaagatct

SEQ ID NO: 226 - DNA, 2117 bp, Homo sapiens
catcggagcagaagctcggggttgctgggcggttccgaggtgacggaagcgggagggtgcgggagaagtcgctgttcgctctgcgagtggctcgccagcgaagaccccgcctgcgcccccggggacggacgaccgcggtgccagggtcccgcgacctgggaccccctcgcggctccgggtggtctacgaactgtgatggcggcggccgcggtgatgggcccggcgcagatcctctgtggttgttgaattgtaacaagagagagaactctggctgcctgagagggcatgactctagtcacagcaggaggggcttggacaggccctggttgttggcatgaagtgaaggatgaagagtcatcttctgaacagagcatttctatagcagtgtcacatgttaatacttccaaggcaggtttgcccgcacagacggctctcccttgtgacatatgtggccccatcttgaaagatattttgcacctggatgaacaccagggtacacaccatggactgaaacttcacacatgtggggcatgtgggagacaattctggttcagtgcaaccttcatcagtaccagaagtgttacagtatagagcaacccttaagaagggataaaagtgaggcctcaattgtgaagaactgcacagttagcaaagaacctcatccgtcagagaagccctttacgtgtaaggaggagcagaaaaacttccaggctactttgggtggctgccaacaaaaggccatccacagtaagaggaagacacacaggagcactgagagtggggatgcatttcatggtgaacaaatgcattacaagtgcagtgaatgtgggaaagctttcagccgcaaagacacacttgtccagcaccagagaattcatagtggagagaagccttatgagtgcagcgaatgtgggaaagccttcagccgcaaagctacacttgtccagcatcagagaatccatactggagaaaggccttatgaatgcagcgaatgtggaaaaaccttcagtcgaaaagacaaccttactcagcacaagagaatccacactggagaaatgccttataagtgcaatgaatgtgggaaatattttagccatcactccaatctaattgtacaccagagagttcacaatggagcaaggccttataagtgcagtgattgtgggaaagtcttcagacacaaatctacacttgttcagcatgagagtattcacactggagaaaatccttatgattgcagtgattgtgggaaatcctttggccacaaatacaccctcattaaacatcagcgaattcacactgagtcaaagccgtttgagtgcattgaatgcgggaaattctttagtcgaagttctgactatattgcacaccagagggttcacactggtgaaaggccttttgtgtgcagtaaatgtgggaaagactttatcagaacctcccaccttgttcgacaccaaagagttcacactggagaaaggccatatgagtgcagtgaatgtgggaaggcctacagcttaagctcccacctcaatcggcaccagaaagttcacactgcaggcaggctttaggagtgctttgaatacaacaggactcatcaatcagatgttgaatttcatgtatctgaacattgacacaaaggagataccttatggtgccaggtacgtgggaaccttctagggatatgttgcactttctgacttgctcaggttttttgccagagttatgtcactgtcaatccatgtggccgaaaccatcttaactctaccagctaagataccccagcattgggaaggcagggtttgtattgtcagtccctggagaaaatcatgaaatgcctgagttcattgggggtcctcattcccttctgtatgacaggtataggtatggatctgacccatttttagccaagagggtctgagctgtatctgctggtggcttatacaaaaagtttactttcttcatggatattcttggtctcacatacttgtaatcaagtttttccagcctccaagtcacctggcctgggaaagtacttgcctcatgttgctctggtttgtgataataaaggctttacagtttaagccacagggaaagaaaaaaaaaaaaaaaaactttag

SEQ ID NO: 227 - DNA, 3260 bp, Homo sapiens
atccagaaagcaccatagcaaccagtgatgtcatgtctgaaagcatggtggagacccatgatcccatacttgggagtggaaaaggggattctggggctgccccagacgtggatgataaattatgtctaagaatgaaactggttagtcctgagactgaggcgagtgaagagtctttgcagttcaacctggaaaagcctgcaactggtgaaagaaaaaatggatctactgctgttgctgagtctgttgccagtccccagaagaccatgtctgtgttgagctgtatctgtgaagccaggcaagagaatgaggctcgaagtgaggatccccccaccacacccatcagggggaacttgctccactttccaagttctcaaggagaagaggagaaagaaaaattggagggtgaccatacaatcaggcagagtcaacagcctatgaagcccattagtcctgtcaaggaccctgtttctcctgcttcccagaagatggtcatacaagggccatccagtcctcaaggagaggcaatggtgacagatgtgctagaagaccagaaagaaggacggagtactaataaggaaaatcctagtaaggccttgattgaaaggcccagccaaaataacataggaatccaaaccatggagtgttccttgagggtcccagaaactgtttcagcagcaacccagactataaagaatgtgtgtgagcaggggaccagtacagtggaccagaactttggaaagcaagatgccacagttcagactgagagggggagtggtgagaaaccagtcagtgctcctggggatgatacagagtcgctccatagccagggagaagaagagtttgatatgcctcagcctccacatggccatgtcttacatcgtcacatgagaacaatccgggaagtacgcacacttgtcactcgtgtcattacagatgtgtattatgtggatggaacagaagtagaaagaaaagtaactgaggagactgaagagccaattgtagagtgtcaggagtgtgaaactgaagtttccccttcacagactgggggctcctcaggtgacctgggggatatcagctccttctcctccaaggcatccagcttacaccgcacatcaagtgggacaagtctctcagctatgcacagcagtggaagctcagggaaaggagccggaccactcagagggaaaaccagcgggacagaacccgcagattttgccttacccagctcccgaggaggcccaggaaaactgagtcctagaaaaggggtcagtcagacagggacgccagtgtgtgaggaggatggtgatgcaggccttggcatcagacagggagggaaggctccagtcacgcctcgtgggcgtgggcgaaggggccgcccaccttctcggaccactggaaccagagaaacagctgtgcctggccccttgggcatagaggacatttcacctaacttgtcaccagatgataaatccttcagccgtgtcgtgccccgagtgccagactccaccagacgaacagatgtgggtgctggtgctttgcgtcgtagtgactctccagaaattcctttccaggctgctgctggcccttctgatggcttagatgcctcctctccaggaaatagctttgtagggctccgtgttgtagccaagtggtcatccaatggctacttttactctgggaaaatcacacgagatgtcggagctgggaagtataaattgctctttgatgatgggtacgaatgtgatgtgttgggcaaagacattctgttatgtgaccccatcccgctggacactgaagtgacggccctctcggaggatgagtatttcagtgcaggagtggtgaaaggacataggaaggagtctggggaactgtactacagcattgaaaaagaaggccaaagaaagtggtataagcgaatggctgtcatcctgtccttggagcaaggaaacagactgagagagcagtatgggcttggcccctatgaagcagtaacacctcttacaaaggcagcagatatcagcttagacaatttggtggaagggaagcggaaacggcgcagtaacgtcagctccccagccacccctactgcctccagtagcagcagcacaacccctacccgaaagatcacagaaagtcctcgtgcctccatgggagttctctcaggcaaaagaaaacttatcacttctgaagaggaacggtcccctgccaagcgaggtcgcaagtctgccacagtaaaacctggtgcagtaggggcaggagagtttgtgagcccctgtgagagtggagacaacaccggtgaaccctctgccctggaagagcagagagggcctttgcctctcaacaagaccttgtttctgggctacgcatttctccttaccatggccacaaccagtgacaagttggccagccgctccaaactgccagatggtcctacaggaagcagtgaagaagaggaggaatttttggaaattcctcctttcaacaagcagtatacagaatcccagcttcgagcaggagctggctatatccttgaagatttcaatgaagcccagtgtaacacagcttaccagtgtcttctaattgcggatcagcattgtcgaacccggaagtacttcctgtgccttgccagtgggattccttgtgtgtctcatgtctgggtccatgatagttgccatgccaaccagctccagaactaccgtaattatctgttgccagctgggtacagccttgaggagcaaagaattctggactggcaaccccgtgaaaatcctttccagaatctgaaggtactcttggtatcagaccaacagcagaacttcctggagctctggtctgagatcctcatgactggtggtgcagcctctgtgaagcagcaccattcaagtgcccataacaaagatattgctttaggggtatttgatgtggtggtgacggacccctcatgcccagcctcggtgctgaagtgtgctgaagcattgcagctgcctgtggtgtcacaagagtgggtgatccagtgcctcattgttggggagagaattggattcaagcagcatccaaaatataaacacgattatgtttctcactaaagatacttggtcttactggttttattccctgctatcgtggagattgtgttttaaccaggttttaaatgtgtcttgtgtgtaactggattccttgcatggatcttgtatatagttttatttgctgaacttttatgataaaataaatgttgaatctctttggttgtagtaactggg

SEQ ID NO: 228 - DNA, 1334 bp, Homo sapiens
tcaggaactggagcagcaaagagaagaacaaaagcgcagagagaaggaagcggaggagaggcagcgagcggaggaaagcaggctctgtgctccttgaagcaagcgctccagaggctccggaagccacggctggattggagacaagatgggatcctcagaggaccaggcctatcgcctccttaatgactacgccaacggcttcatggtgtcccaggttctcttcgccgcctgcgagctgggcgtgtttgaccttctcgccgaggccccagggcccctggacgtggcggcagtggctgcaggtgtgagggccagcgcccatgggacagagctcctgctggacatctgtgtgtccctgaagctgctgaaagtggagacgaggggaggaaaagctttctatcgaaacacagagctgtccagcgactacctgaccacggtcagcccgacgtcacaatgcagcatgctgaagtacatgggcaggaccagctaccggtgctggggccacctggcagacgccgtgagagaaggaaggaaccagtacctggagacgtttggcgttcccgctgaagagctttttacggccatctacaggtccgagggcgagcggctacagttcatgcaagctctgcaggaggtctggagcgtcaacgggagaagcgtgctgaccgcctttgacctgtcagtgttcccacttatgtgtgaccttggtgggacacggataaagctggaaaccatcattctcagcaaactatcgcaaggacagaaaaccaaacaccgcgtgttctcactcataggtggggctggagctctggctaaggaatgcatgtctctgtaccctggatgtaagatcaccgtttttgacatcccagaagtggtgtggacggcaaagcagcacttctcattccaggaggaagaacagattgacttccaggaaggggatttcttcaaagaccctcttccggaagctgatctgtacatcctggccagggtcctccatgactgggcagacggaaagtgctcacacctgctggagaggatctaccacacttgcaagccaggtggtggcattctggtaattgaaagcctcctggatgaagacaggcgaggtcctctgctcacgcagctctactctctgaacatgcttgtgcagacggaagggcaggagaggacccccacccactaccacatgctcctctcttctgctggcttcagagacttccagtttaagaaaacaggagccatttatgatgccattttagccaggaaataactgtttcttgtgacctggaactaacgtcaaagcacacaagacataataataaagacatgtacctcca

SEQ ID NO: 229 - DNA, 4977 bp, Homo sapiens
caagataccctccaggccctcatcaccttttttcaagtcaagatttcatcccatacatgcatgactcaatcagatttggaaatgtggatatgccctgtcgtccaagcccaatatagcccttcccctccaggttccagttatgcggtcgtcagacatacagctcggaatacaccacggagatcatgaaccccgactacaccaagctgaccatggaccttggcagcactgagatcacggctacagccaccacgtccctgcccagcatcagtacctttgtggagggctactcgagcaactacgaactcaagccttcctgcgtgtaccaaatgcagcggcccttgatcaaagtggaggaggggcgggcgcccagctaccatcaccatcaccaccaccaccaccaccaccaccaccatcaccagcagcagcatcagcagccatccattcctccagcctccagcccggaggacgaggtgctgcccagcacctccatgtacttcaagcagtccccaccgtccacccccaccacgccggccttccccccgcaggcgggggcgttatgggacgaggcactgccctcggcgcccggctgcatcgcacccggcccgctgctggacccgccgatgaaggcggtccccacggtggccggcgcgcgcttcccgctcttccacttcaagccctcgccgccgcatccccccgcgcccagcccggccggcggccaccacctcggctacgacccgacggccgctgccgcgctcagcctgccgctgggagccgcagccgccgcgggcagccaggccgccgcgcttgagggccacccgtacgggctgccgctggccaagagggcggccccgctggccttcccgcctctcggcctcacgccctcccctaccgcgtccagcctgctgggcgagagtcccagcctgccgtcgccgcccagcaggagctcgtcgtctggcgagggcacgtgtgccgtgtgcggggacaacgccgcctgccagcactacggcgtgcgaacctgcgagggctgcaagggctttttcaagagaacagtgcagaaaaatgcaaaatatgtttgcctggcaaataaaaactgcccagtagacaagagacgtcgaaaccgatgtcagtactgtcgatttcagaagtgtctcagtgttggaatggtaaaagaagttgtccgtacagatagtctgaaagggaggagaggtcgtctgccttccaaaccaaagagcccattacaacaggaaccttctcagccctctccaccttctcctccaatctgcatgatgaatgctcttgtccgagctttaacagactcaacacccagagatcttgattattccagatactgtcccactgaccaggctgctgcaggcacagatgctgagcatgtgcaacaattctacaacctcctgacagcctccattgatgtatccagaagctgggcagaaaagattccgggatttactgatctccccaaagaagatcagacattacttattgaatcagcctttttggagctgtttgtcctcagactttccatcaggtcaaacactgctgaagataagtttgtgttctgcaatggacttgtcctgcatcgacttcagtgccttcgtggatttggggagtggctcgactctattaaagacttttccttaaatttgcagagcctgaaccttgatatccaagccttagcctgcctgtcagcactgagcatgatcacagaaagacatgggttaaaagaaccaaagagagtcgaagagctatgcaacaagatcacaagcagtttaaaagaccaccagagtaagggacaggctctggagcccaccgagtccaaggtcctgggtgccctggtagaactgaggaagatctgcaccctgggcctccagcgcatcttctacctgaagctggaagacttggtgtctccaccttccatcattgacaagctcttcctggacaccctacctttctaatcaggagcagtggagcagtgagctgcctcctctcctagcacctgcttgctacgcagcaaagggataggtttggaaacctatcatttcctgtccttccttaagaggaaaagcagctcctgtagaaagcaaagactttcttttttttctggctcttttccttacaacctaaagccagaaaacttgcagagtattgtgttggggttgtgttttatatttaggcattgggggatggggtgggagggggttatagttcatgagggttttctaagaaattgctaacaaagcacttttggacaatgctatcccagcaggaaaaaaaaggataatataactgttttaaaactctttctggggaatccaattatagttgctttgtatttaaaaacaagaacagccaagggttgttcgccagggtaggatgtgtcttaaagattggtcccttgaaaatatgcttcctgtatcaaaggtacgtatgtggtgcaaacaaggcagaaacttccttttaatttccttcttcctttattttaacaaatggtgaaagatggaggattacctacaatcagacatggcaaaacaatatggctgtttgcttcataacagctgcaatttttaaagtgctgtcttactaagtcttgttatactctcttatctatatgccggaaataaaaaggaggcagtcatgttagcaaatgacacgttaatatccctagcagaggctgtgttcaccttccctgtcgatcccttctgaggtatggcccatccaagacttttaggccattcttgatggaaccagatccctgccctgactgtccagctatcctgaaagtggatcagattataaactggattacatgtaactgttttggttgtgttctatcaaccccaccagagttccctaaacttgcttcagttatagtaactgactggtatatcattcagaagcgccataagtcagttgagtattgatcctagataagaacatgcaatcagaggactggtcatacagggtaagcaccagggacaataaggatttttatagatataatttaatttttgttattggttaaggagacaattttggagagcaagcaaatcttctttttaaaaaatagtatgaatgtgaatactagaaaagatttaagaaatagtatgagtgtgagtcataggaaggattagtgggctgcgtttcaacattccgtgttcgtactcccttttgtatgtttctactgttaatgccatattactatgagataatttgttgcatagtgtccttatttgtataaacatttgtatgcacgttatattgtaatagctttgcctgtatttattgcaagaccaccagctcctggaagctgagttacagagtaattaaatggggtgttcacagtgacttggatacaccaattagaaattaaataagcaaatatatatatatatatataaatatagcaggttacatatatatatttataatgtgtctttttattaaccatttgtacaataaatgtcacttcccatgccgttattttatggttcatttgcagtgacttttaaggcagtactgtttagcactttgatattaaaattttgcttatgttttgctaaattcgaataatgtttgaagatttttaggtctaaaagtctttatattatatacgctgtatcaagtcaaaatatctttggccattttgctaagaaacaaactttgaatgtcaaactgatgtcacagtagtttttgttagctttaaatcatttttgctttagtctttttaaaggaaaataacaaaactatgctgtttatattgcattaattatacaatcaaacaaatgccaaatgaattgcctaattgcgcaagataacccagataggaaatcatatgtttttttccaagagtcattctaatatttgattatgttatgtgtgcttttatgaaagattgttatttttatatatcaagatgatagaacctggaatgttaggattttgaaatgttagacttggaaggggcctggtctgtcaactagtccaaccccttaaaattcatagaggacgaaactggggcccaattgaagggtgaagagttactcaaggtcaaacagctggtaacagaatcaagactaagacctaatttacctttccatactctttttttttctcaacttcatctatataaaatcaggcttttaaacataaccactaatatttacctgaagataaccatgagtaaagtatacttttgcattaattttttgagtatatgcaaacataataaatattattaaatatcaaggaaagctaacatttcatacaagatagcttcagaccaaattcaaattgaatttgaataaattagaaatactgtgcatacataaccttcttgtgcaccatgagtatttggaaagttaatccttgtttttgtcgtgtctatagagaacaaacaaataaaaacagagccctagagaaatggcgttactttttatttttacacccatcagatttaaggaaaagactttttagccattataatctagtggttggaaggaatgaagaagcttttttagtaataggtccagatatgagtgctaaaaataaagatgatagcatgttcttctgtcttccatagttattacaactatgagagcctcccaagtcatcttatcaactcaacccccttttttttgtcttaatgttgcacataagtttatacagagtggatgaccacactagcacagaagagaacaacatgtattaaagcaggtgattcctcccttggcgggagagctctctcagtgtgaacatgccttctgtgggcggaaatcaggaagccaccagctgttaatggagagtgccttgcttttatttcagacagcagagttttccaaagtttctctgctcctctaacagcattgctctttagtgtgtgttaacctgtggtttgaaagaaatgctcttgtacattaacaatgtaaatttaaatgattaaattacattttatcaatggca

SEQ ID NO: 230 - DNA, 14770 bp, Homo sapiens
gggacaccatcatttgggtttttaaaagcttcagcttctccagcatctttgcattgtgaatatcttcctgcttctagtcaaagctttctctctagtgattggaatgctgctgtaagcctattagaggtgcctgaggatatcaccttttacaaggaagccgtgtgtgcttgagaggatctttttaaatgcattatggctcatgcagcctcacaattaaagaaaaacagggatttagaaatcaatgctgaagaagagcctgagaaaaaaaggaaacaccgcaaacggtcccgggatcggaagaaaaagtctgatgccaatgcaagttacttaagagcagctcgagctggacaccttgaaaaggccctcgactacataaaaaatggagttgacatcaacatttgcaatcagaatgggttgaacgctctccaccttgcttccaaagaaggccatgtagaggttgtttctgagctgctgcagagagaagccaatgtggatgcagctacaaagaaaggaaacacagcattgcacatcgcatctttggctgggcaagcagaggtggtaaaagtcttggttacaaatggagccaatgtcaatgcacaatctcagaatggtttcacgccattgtatatggcagcccaggaaaatcacctggaagttgtcaagtttcttcttgacaatggtgcaagccagagcctagccacagaggatggcttcacaccattggcagtggctttgcaacaaggtcacgaccaagtcgtttcgctcctgctagagaatgacaccaaaggaaaagtgcgtctcccagctcttcatatcgcggcccgcaaagacgacacaaaagccgccgccctgctgctgcagaatgacaacaatgcagatgtggaatcaaagagtggcttcactccgctccacatagctgctcactatggaaatatcaatgtagccacgttgctgttaaaccgagcggctgctgtggatttcaccgcaaggaatgacatcactcctttacatgttgcatcaaaaagaggaaatgcaaatatggtaaaactattgctcgatcgaggagctaaaatcgatgccaaaaccagggatggtctgacaccactgcactgtggagcaaggagtggccacgagcaggtggtagaaatgttgcttgatcgagctgcccccattctttcaaaaaccaagaatggattatctccattgcacatggccacacaaggggatcatttaaactgcgtccagcttctcctccagcataatgtacccgtggatgatgtcaccaatgactacctgactgccctacacgtggctgcccactgtggccattacaaagttgccaaggttctcttggataagaaagctaaccccaatgccaaagccctgaatggctttacccctcttcatatcgcctgcaagaagaatcgaattaaagtaatggaactccttctgaaacacggtgcatccatccaagctgtaaccgagtcgggccttaccccaatccatgttgctgccttcatggggcatgtaaatattgtatcacaactaatgcatcatggagcctcaccaaacaccaccaatgtgagaggagaaacagcactgcacatggcagctcgctccggccaagctgaagttgtgcggtatctggtacaagacggagctcaggtagaagctaaagctaaggatgaccaaacaccactccacatttcagcccgactggggaaagcagacatagtacaacagctgttgcagcaaggggcatctccaaatgcagccacaacttctgggtacaccccacttcacctttccgcccgagaggggcatgaggatgtggccgcgttccttttggatcatggagcgtctttatctataacaacaaagaaaggatttactcctcttcatgtggcagcaaaatatggaaagcttgaagtcgccaatctcctgctacagaaaagtgcatctccagatgctgctgggaagagcgggctaacaccactgcatgtagctgcacattacgataatcagaaagtggcccttctgcttttggaccaaggagcctcacctcacgcagccgcaaagaatggttatacgccactgcacatcgctgccaaaaagaaccagatggacatagcgacaactctgctggaatatggtgctgatgccaacgcagttacccggcaaggaattgcttccgtccatctcgcagctcaggaagggcacgtggacatggtgtcgctgctcctcggtagaaatgcgaatgtgaacctgagcaataagagcggcctgaccccactccatttggctgctcaagaagatcgagtgaatgtggcagaagtcctcgtaaaccaaggggctcatgtggacgcccagacaaagatgggatacacaccactgcatgtgggctgccactatggaaatatcaagattgttaatttcctgctccagcattctgcaaaagttaatgccaaaacaaagaatgggtatacgccattacatcaagcagcacagcaggggcatacgcatataataaatgtcttacttcagaacaacgcctcccccaatgaactcactgtgaatgggaatactgcccttggcattgcccggcgcctcggctacatctcagtagtggacaccctgaagatagtgaccgaagaaaccatgaccacaactactgtcacagagaagcacaaaatgaatgttccagaaacgatgaatgaagttcttgatatgtctgatgatgaagttcgtaaagccaatgcccctgaaatgctcagtgatggcgaatatatctcagatgttgaagaaggtgaagatgcaatgaccggggacacagacaaatatcttgggccacaggaccttaaggaattgggtgatgattccctgcctgcagagggttacatgggctttagtctcggagcgcgttctgccagcctccgctccttcagttcggataggtcttacaccttgaacagaagctcctatgcacgggacagcatgatgattgaagaactccttgtgccatccaaagagcagcatctaacattcacaagggaatttgattcagattctcttagacattacagctgggctgcagacaccttagacaatgtcaatcttgtttcaagccccattcattctgggtttctggttagctttatggtggacgcgagagggggctccatgagaggaagccgtcatcacgggatgagaatcatcattcctccacgcaagtgtacggcccccactcgaatcacctgccgtttggtaaagagacataaactggccaacccacccccacatggtgaaaggagagggattagcagtaggctggtagaaatgggtcctgcaggggcacaatttttaggccctgtcatagtggaaatccctcactttgggtccatgagaggaaaagagagagaactcattgttcttcgaagtgaaaatggtgaaacttggaaggagcatcagtttgacagcaaaaatgaagatttaaccgagttacttaatggcatggatgaagaacttgatagcccagaagagttagggaaaaagcgtatctgcaggattatcacgaaagatttcccccagtattttgcagtggtttcccggattaagcaggaaagcaaccagattggtcctgaaggtggaattctgagcagcaccacagtgccccttgttcaagcatctttcccagagggtgccctaactaaaagaattcgagtgggcctccaggcccagcctgttccagatgaaattgtgaaaaagatccttggaaacaaagcaacttttagcccaattgtcactgtggaaccaagaagacggaaattccataaaccaatcacaatgaccattccggtgcccccgccctcaggagaaggtgtatccaatggatacaaaggggacactacacccaatctgcgtcttctctgtagcattacagggggcacttcgcctgctcagtgggaagacatcacaggaacaactcctttgacgtttataaaagattgtgtctcctttacaaccaatgtttcagccagattttggcttgcagactgccatcaagttttagaaactgtggggttagccacgcaactgtacagagaattgatatgtgttccatatatggccaagtttgttgtttttgccaaaatgaatgatcccgtagaatcttccttgcgatgtttctgcatgacagatgacaaagtggacaaaactttagagcaacaagagaattttgaggaagtcgcaagaagcaaagatattgaggttctggaaggaaaacctatttatgttgattgttatggaaatttggccccacttaccaaaggaggacagcaacttgtttttaacttttattctttcaaagaaaatagactgccattttccatcaagattagagacaccagccaagagccctgtggtcgtctgtcttttctgaaagaacgaaagacaacaaaaggactgcctcaaacagcggtttgcaacttaaatatcactctgccagcacataaaaaggagacagagtcagatcaagatgatgagattgagaaaacagatagacgacagagcttcgcatccttagctttacgtaagcgctacagctacttgactgagcctggaatgattgaacggagtacaggagcaacaagatccctccccaccacttactcatacaagccattcttttctacaagaccataccagtcctggacaacagctccgattacagtgcctgggccagccaagtcaggcttcacttccttatcaagttcttcctctaatacgccatcagcttctccgttaaaatcaatatggtctgtttcgacaccttctccaatcaaatccacattaggcgcgtcaactacatcttcagttaaatccattagtgacgtggcatctccaattagatccttacggacaatgtcttcgccgataaaaactgtggtgtcacaatctccatacaatatccaggtttcctctggtaccctggctagagctccagcagtcacggaagctacgcccttaaaagggctggcatccaattctacgttttcctctcgaacctctccagtgactacagcagggtctcttttggagaggtcatcaattactatgacaccccctgcctcccccaaatcaaacattaatatgtattcctcaagtttgccatttaagtcaattattacatcagcagcaccgctaatatcttcacctttaaagtcagtggtgtctccagttaaatcacgagttgatgtcatttcatcagccaaaattacaatggcatcttctctctcatcacctgtgaagcagatgcctggacatgcagaggtagcattagtcaatggatctatttcccctctaaaatatgcatcatcctcaactttaattaatggatgcaaagccactgccacgttacaggaaaaaatttcttctgctacaaactctgtgagctctgtggtcagtgcagccactgacacagttgagaaagtgttttctaccacgactgcaatgccattttccccactcaggtcatatgtttctgcagcaccatcagcttttcagtctctaagaactccttccgcaagtgcactctatacatcccttgggtcgtcaatatctgcaactacctcatctgtaacttcatcaattataacagtgccagtatactctgtagtcaatgttttgccagaaccagcattaaagaaacttccagactctaattcatttacaaaatcagcagcagccttgctgtcacccattaaaacattgactacggagacacatcctcagcctcacttcagtcgaacttcatctccagttaagtcatctttgttccttgcaccctctgcccttaagttgtctacaccatcttctttatcttccagtcaggagatactaaaagatgtagctgaaatgaaagaggacctaatgcggatgaccgcaatactacagacagatgtgcctgaggagaagccattccaacctgaactcccaaaggaagggagaatagatgatgaagaacctttcaaaattgtagagaaagtaaaggaagacttagtgaaagttagtgaaatccttaaaaaggatgtatgtgtagataataaaggatcacccaaatcaccaaagagtgacaaaggacactctcctgaagatgactggatagaatttagttcggaagaaatccgggaagccagacaacaagctgctgcgagccagtctccatctctgccagagagagtgcaagtaaaagcaaaagccgcctccgaaaaggattataacttgaccaaagttattgattacctaacaaatgatattgggagtagttcactgacaaacttaaaatacaagtttgaggatgcaaagaaggatggtgagggaggacagaaaagagttttaaaaccagcaattgctttgcaggaacacaaactcaaaatgcctccagcctccatgaggacttccacctctgagaaagaattgtgtaaaatggctgattccttttttggaacagatactattttagagtctcctgatgacttttctcaacacgaccaagataaaagtcccttgtctgacagtggctttgaaacaagaagtgaaaagacaccttcagccccacaaagcgctgaaacgactggtcctaaaccactttttcatgaagttcccatccctcctgttattacagaaacaagaactgaagtggttcatgttatcaggagctatgatccctcagctggggatgttccccagacccaaccagaggagcctgtgtcacctaaaccttcacctacttttatggaattggaaccaaagcccaccacctctagtattaaagaaaaggttaaagcatttcaaatgaaagccagtagtgaagaagatgaccacaatcgggttttaagcaaaggcatgcgtgttaaagaagagactcacataaccacaaccaccagaatggtttatcattctccaccaggcggtgaaggtgcatctgaaagaattgaagaaaccatgtcagtccatgacatcatgaaggcctttcagtccgggcgggatccttccaaagaactggcaggtctgtttgaacataagtcggcagtgtctccagatgttcacaagtctgctgctgaaacctcagcccagcatgcagagaaggacaaccaaatgaaacccaaactggagcgtataatagaagtccacatcgaaaaaggtaaccaagctgagcccactgaagtcattattagagaaaccaaaaagcatccagaaaaagaaatgtatgtatatcagaaagacttatcccggggagatattaacctaaaagattttctgccagaaaaacacgatgcttttccttgttcagaggaacagggtcagcaagaagaagaagaacttactgctgaagagtcattgccttcttatctggagtcttccagagtaaacactcctgtgtcccaagaagaagatagccgccctagttctgctcaactcatatctgatgactcttataaaacattgaagcttttgagtcaacactcaatagaataccatgacgatgagttgtcagaactaagaggggagtcttacaggtttgctgagaaaatgcttctgtcagaaaagctagatgtgtctcattctgatactgaggaatcggttacagaccatgcaggaccccctagctcagagttacaggggtctgataagcggtccagagaaaaaatagccactgcccccaaaaaagaaattctctccaaaatctataaagatgtttctgaaaatggtgtaggtaaagtgtctaaagatgagcattttgataaagtgacagtgttgcactattctggcaatgttagtagtccaaaacatgccatgtggatgcgctttactgaggacagattagacagaggtagagagaagttgatatatgaagatagggtggacaggactgtgaaggaggctgaagaaaaactgactgaagtgtcacagttttttcgtgacaaaactgaaaagctaaatgatgaactgcagtccccagagaaaaaggcacgccctaaaaatggcaaagaatattcttctcaaagccctaccagtagcagccctgagaaagtgctactgacagaactgctggcatccaatgatgagtgggttaaggcaagacagcatggccctgatggacaaggcttccccaaggccgaggagaaggcacccagtctgcccagcagcccagagaagatggttctctcccaacagactgaggacagcaagtccacagtggaagccaaaggaagtatttcacagagcaaagcaccagatgggccccagtctggattccagctcaaacaatctaaactcagttccattagattaaaatttgaacaaggcacacacgcaaaaagtaaggacatgtctcaagaagacagaaagtcagatggccagtccagaatcccagttaaaaaaatacaggagagcaagctacccgtctaccaagtttttgctagagaaaaacagcagaaggccatagacctcccagatgaaagtgtatctgtgcaaaaagattttatggtattaaaaaccaaagatgagcatgcccaaagcaacgaaattgttgtaaatgattctggctctgataatgtgaaaaaacagagaactgaaatgtcaagtaaagcaatgcctgactctttttctgagcagcaggctaaagacttggcatgtcatataacctcagatttagcaactaggggaccatgggacaaaaaggtctttagaacatgggagagttcgggagccactaacaataagtctcagaaagaaaaactttcgcatgtacttgttcatgatgtaagagagaatcacattggtcaccctgagagtaaaagtgttgatcaaaagaatgaatttatgtctgtgactgagagagaacgcaaattgttaacaaacggctctctctcagaaattaaagaaatgactgtaaaatctccctccaaaaaagtcttatatagggaatatgttgtgaaagaaggggaccatccaggcggattgcttgatcagccttccaggaggagcgagagctcagcagtgtcacacattcccgtcagagttgctgatgagaggagaatgctgtcttctaatattcccgatggtttttgtgaacagtcggcatttccaaaacatgaactatcacaaaaattgtcccagtcaagcatgagtaaagagacagttgagacacagcactttaattctatagaagatgaaaaagttacctattcagaaatcagcaaagtttccaaacaccagagttatgtaggtttatgcccacctctcgaggaaaccgaaacctcccccaccaaatctcctgattctttagagtttagcccaggaaaggaatctccctctagtgatgtattcgaccacagtcccattgatggattggaaaaactcgcaccactagcccagacagagggagggaaagagataaaaactttacccgtttatgtcagttttgtacaagtggggaagcaatatgaaaaggagatacaacaaggaggtgtaaaaaaaatcataagtcaggaatgtaagacagtacaagaaaccagggggaccttttatacaactagacagcaaaagcaacctccttctccccaaggtagtccagaagatgatactctagagcaagtatcctttctagacagctctgggaaaagccctttaaccccagaaacacccagttcagaggaagtgagttatgaatttacatctaagacacctgactcgctcatagcttatataccaggcaaacccagcccaattcccgaggtttctgaggagtcagaggaggaggaacaggccaagtcaacctcccttaagcagactacagtggaggaaacagcagttgagcgtgaaatgcctaatgacgtgagcaaagactctaaccaaagacccaaaaataacagagttgcctatattgaatttccccctcctccaccactggatgcggaccagattgagtcagataagaagcatcattatctcccagaaaaagaggttgacatgattgaagtcaatctgcaagatgagcatgacaagtaccagctggctgaacctgtcattagagtgcagccaccttcaccagttcctcccggggcagacgtcagtgattcaagcgatgacgaatctatttatcagccagtcccagttaaaaaatataccttcaaattaaaggaagtggacgatgaacaaaaagaaaaacccaaagcttctgctgaaaaggcttccaaccagaaagaactggaaagtaatggatctggaaaagataatgaatttggccttggccttgattcacctcagaatgaaattgcccagaatgggaacaacgaccagtccatcacagagtgttccattgccaccacagcagagttttctcatgacacggatgccacagagatcgactctctggatggctatgacctgcaagatgaagatgatggcttgacagagagtgattctaaactcccaattcaagccatggaaattaagaaagatatctggaacacagagggcattctgaagccagctgaccgctcttttagccaaagtaaacttgaagttatcgaggaggagggaaaggtgggaccagatgaggacaagccaccttctaaaagttcttcatctgaaaagactcctgataagactgatcagaagtcaggggcccagttcttcacactggaaggcagacatcctgacagatcagtgtttcctgatacttacttcagttacaaagtagatgaagaatttgccactccttttaaaacagtagctaccaaaggtctagattttgacccttggtctaataaccgaggggatgatgaagtttttgacagtaaatcacgggaagatgaaactaagccatttgggctggcggtagaagaccgctctccagcaacaacccctgatacaacgccagccagaacgccaactgatgaaagtaccccaactagtgagcctaaccccttcccatttcatgaaggaaaaatgtttgagatgactcgcagtggtgcaattgacatgagcaagagggattttgttgaagagaggctccaatttttccagattggtgagcatacttctgaagggaagtcaggggaccagggggaaggggataaaagtatggtcactgccacaccacagccacagtcaggggacaccactgtagaaaccaatctagagagaaatgtagagacacctacagtggaacctaaccccagcatcccgaccagcggagagtgtcaggaaggcacatccagtagtggctccctggagaaatcagcagcagccactaacacctctaaagttgaccccaagttgcgcacgcctataaaaatgggaatttctgcatccaccatgaccatgaagaaagaaggccctggagaaataacagataagatagaagcggtgatgaccagttgtcagggattagaaaatgaaactataacaatgatttcaaatacagccaatagccagatgggcgttaggccccatgaaaaacatgattttcaaaaagataactttaataacaacaacaatttggattcttccactatacagacagataacattatgagtaatatagttctgacagaacattctgcacccacttgtaccacagagaaagataacccagtgaaagtctcatcaggaaaaaagacaggggtactacaaggacactgtgtaagagataagcagaaagttcttggagaacagcaaaaaacaaaggaattgatagggattaggcaaaaatccaaacttcccataaaggccacttcaccaaaagataccttcccaccgaaccatatgtcaaacactaaagcaagtaaaatgaagcaggttagtcaatccgagaaaaccaaagcccttactacttcttcatgtgtagatgtaaagtccagaattccagtgaaaaacacacccagggataacataattgcagttagaaaagcatgtgccacacaaaagcaagggcagccagagaaaggcaaggccaaacagcttccatccaagttgccagtaaaggtaagatccacctgtgtcactaccaccaccaccactgccaccaccaccaccactaccaccactaccaccaccaccagctgcacagttaaagttaggaaaagtcagctcaaggaagtatgtaaacattccattgaatattttaagggaattagtggtgagaccttaaagcttgtggaccgcctctctgaagaagaaaaaaagatgcagtccgagttgtccgatgaggaagaaagtacctcaagaaacacgtcgttgtccgagacttcccggggtggccagccttcggttacaacgaagtctgctagagataagaaaacagaggcagcacctttaaaatcaaagagtgaaaaggccggcagtgagaaaaggagcagtagaaggactggtccacagagtccatgtgaacggacagatatcaggatggcaatagtagccgatcacctgggacttagttggacagaactggcaagggaactgaatttttcagtggatgaaatcaatcaaatacgtgtggaaaatccaaattctttaatttctcagagcttcatgttattaaaaaaatgggttaccagagacggaaaaaatgccacaactgatgccttaacttcggtcttgacaaaaattaatcgaatagatatagtgacactgctagaaggaccaatatttgattatggaaatatttcaggcaccagaagttttgcagatgagaacaatgttttccatgaccctgttgatggttggcagaatgagacatcaagtggaaacctagagtcctgcgctcaagctcgaagagtaactggtgggttactagatcgactggatgacagccctgaccagtgtagagattccattacctcatatctcaaaggagaagctggcaaatttgaagcaaatggaagccatacagaaatcactccagaagcaaagacaaaatcttactttccagaatcccaaaatgatgtaggaaaacagagtaccaaggaaactctgaaaccaaaaatacatggatctggtcatgttgaagaaccagcatcaccactagcagcatatcagaaatctctagaagaaaccagcaagcttataatagaagagactaaaccctgtgtgcctgtcagtatgaaaaagatgagtaggacttctccagcagatggcaagccaaggcttagcctccatgaagaagaggggtccagtgggtctgagcaaaagcagggagaaggttttaaggtgaaaacgaagaaagaaatccggcatgtggaaaagaagagccactcgtaacagcgaacggtcagtcaaggatcataagtttttactgccagtattgagaaattcgtggaagaaatgtcagcaggaagtaaaaattcaccgagaagtgtgtgtgtgttcgctgcttccacacattaatggcatgattttttttatgcaaaaagaaaagaaaagaaaaccacccacattttaatttagcatgagccaatttacagagcatggaaatcactttcatttccggattggcgcgtgtgcaattagcaatgcagtgtatatacaagaagccatgctgttaacagtttatctcaagtaatttggtgtcatttacaaaaggaagaaattcttgccatcagaagggacagaaggagatggaatgatcaaatcacagagaaacactaaaattactaaatctacaacagctcgccttatttttcttggacccaaactgtcagggtataaacactatttgtttcttttttaaaacatcgatagttttgctgtaaataataacactgtataaattctaacagaaaaatagaataaaatgttgataaggcactgcctcttagaacacaaacagaatattgcaaatgcatttaacaaataggggtctcaagtgacttcaccctagaagaggagggagggattctgggtgggggtgactcttcactgattcttgtatattagcaattataatgtttgtatatgcaaaactgctagcttgattttaaaaaaaaacaaatctttaaaatctgctgcaaatttaaataattcccaaaatgaggaattctgtagttctgtgaaaaatttttttcttcagaatactaatattttgatgcatgtgtatcaccttattttgattaaatcttttccaattttgcaaacactacagtatactgcaacacaaaagattttatctgtaaacacaaagcccttcatctaatatttgttgctattgccaatttttcaatgaaatgacctaaaaacaacaaaaaaaaataacctatacggtagttgctttagggggtggggggatgctatctgttagtgcttaaaagggggtaaatgcttgccgctttagaggtggatggtgctcataaaaggccccagtcgggggtatttaaaaaggactgaacagaaatccttagctagtagaatggcagcacgctgtaaaattattactgtattgtgtactggctataagatgtagacacctttcagtaagccaatcatttgtaaccattctagcagtgtcatattaggttaataaggctgctgtgttttaaagggcatttttatttgggttttggtgaaattctttaatttgttgattatattcacataaaatcagcattcattgacacatagctctaatgacatatgtatgaaaaaccatacactggatgacctagtcgattatttaagcataaaataaattgtgttaaactcttcacct

SEQ ID NO: 231 - DNA, 2832 bp, Homo sapiens
aggaagctgaaccatctatctccagaaatgtcttcagaaagtaaagagcaacataacgtttcacccagagactcagctgaaggaaatgacagttatccatctgggatccatctggaacttcaaagggaatcaagtactgacttcaagcaatttgagaccaatgatcaatgcagaccttatcataggatccttattgagcgtcaagagaaatcagatacaaacttcaaggagtttgttattaaaaagctgcagaagaattgccagtgcagtccagccaaagccaaaaatatgattttaggtttccttcctgttttgcagtggctcccaaaatacgacctaaagaaaaacattttaggggatgtgatgtcaggcttgattgtgggcatattattggtgccccagtccattgcttattccctgctggctggccaagaacctgtctatggtctgtacacatctttttttgccagcatcatttattttctcttgggtacctcccgtcacatctctgtgggcatttttggagtactgtgccttatgattggtgagacagttgaccgagaactacagaaagctggctatgacaatgcccatagtgctccttccttaggaatggtttcaaatgggagcacattattaaatcatacatcagacaggatatgtgacaaaagttgctatgcaattatggttggcagcactgtaacctttatagctggagtttatcaggtagcgatgggcttctttcaagtgggttttgtttctgtctacctctcagatgccttgctgagtggatttgtcactggtgcctccttcactattcttacatctcaggccaagtatcttcttgggctcaaccttcctcggactaatggtgtgggctcactcatcactacctggatacatgtcttcagaaacatccataagaccaatctctgtgatcttatcaccagccttttgtgccttttggttcttttgccaaccaaagaactcaatgaacacttcaaatccaagcttaaggcaccgattcctattgaacttgttgttgttgtagcagccacattagcctctcattttggaaaactacatgaaaattataattctagtattgctggacatattcccactgggtttatgccacccaaagtaccagaatggaacctaattcctagtgtggctgtagatgcaatagctatttccatcattggttttgctatcactgtatcactttctgagatgtttgccaagaaacatggttacacagtcaaagcaaaccaggaaatgtatgccattggcttttgtaatatcatcccttccttcttccactgttttactactagtgcagctcttgcaaagacattggttaaagaatcaacaggctgccatactcagctttctggtgtggtaacagccctggttcttttgttggtcctcctagtaatagctcctttgttctattcccttcaaaaaagtgtccttggtgtgatcacaattgtaaatctacggggagcccttcgtaaatttagggatcttcccaaaatgtggagtattagtagaatggatacagttatctggtttgttactatgctgtcctctgcactgctaagtactgaaataggcctacttgttggggtttgtttttctatattttgtgtcatcctccgcactcagaagccaaagagttcactgcttggcttggtggaagagtctgaggtctttgaatctgtgtctgcttacaagaaccttcagactaagccaggcatcaagattttccgctttgtagcccctctctactacataaacaaagaatgctttaaatctgctttatacaaacaaactgtcaacccaatcttaataaaggtggcttggaagaaggcagcaaagagaaagatcaaagaaaaagtagtgactcttggtggaatccaggatgaaatgtcagtgcaactttcccatgatcccttggagctgcatactatagtgattgactgcagtgcaattcaatttttagatacagcagggatccacacactgaaagaagttcgcagagattatgaagccattggaatccaggttctgctggctcagtgcaatcccactgtgagggattccctaaccaacggagaatattgcaaaaaggaagaagaaaaccttctcttctatagtgtgtatgaagcgatggcttttgcagaagtatctaaaaatcagaaaggagtatgtgttcccaatggtctgagtcttagtagtgattaattgagaaggtagatagaagaatgtctagccaataggttaaaatttcaagtgtccaacatttcccagttccacagtgggaaattttgcacacttgaaattttaaccaagtggctagatattattcctcctttgaagctaatggcatttgtatatacacactgcagcagagcttgtagctggacagagtcaaaaagaagaaaatacggtttcaggctttcttgcagatatgaagtattcttggaatgcaataagtatgtattgaactgtactgtaaagtagctccaaaacttaattactctcctgttttaggggttatacatttggactgtgcattctccaagagatgaagcggtgaagttgggatttacattggaagtgctgtagacttctttatgtggctcagtggagagagggaaagaatgttgcacctgctctagtaccataggtcaagaggcttctggatcacaaagtcataactagacaggtttgttcttgtagttttctatccccagtctttgctccccagatggcagtagtttttagtaggaaagtgccattcctgtccttaaggcacagtctcatcag

SEQ ID NO: 232 - DNA, 2382 bp, Homo sapiens
agtaccgctgcggccgggggattgggccggggtctccaccgccgaccgaggggagcggcgtccgctcggccctgctttttgcgacctgccgtcagccccacgtcgccggcctggaggggcgaagaggacgaggggcgcaaggcttcctccggggacattggctccctggattatcaagcagtttgtagttgacattgaatccaggctgaggatggaaggtgtggaacttaaagaagaatggcaagatgaagattttccgatacctttaccagaagatgatagtattgaagcagatatactagctataactggaccagaggaccagcctggctcactagaagttaatggaaataaagtgagaaagaaactaatggctccagacattagcctgacactggatcctagtgatggctctgtattgtcagatgatttggatgaaagtggggagattgacttagatggcttagacacaccgtcagagaatagtaatgagtttgagtgggaagatgatcttccaaaacccaagactactgaagtaattaggaaaggctcaattactgaatacacagcagcagaggaaaaagaagatggacgacgctggcgtatgttcaggattggagaacaggaccacagggttgatatgaaggcaattgaaccctataaaaaagttatcagccatgggggatattatggggatggattaaatgccattgttgtatttgctgtctgtttcatgcctgaaagtagtcagcctaactatagatacctgatggacaatctttttaaatatgttattggcactttggagctattagtagcagaaaactacatgatagtttatttaaatggtgcaacaactcgaagaaaaatgcccagtctgggatggctcaggaaatgttatcagcaaattgatagaaggttacggaaaaatctaaaatccctaatcattgtacatccttcttggtttatcagaacacttctggctgttacaagaccatttattagctcgaaattcagccaaaaaattagatacgtgtttaatttggcagaactagcagaacttgtccccatggaatacgttggcataccagaatgcataaaacaagttgatcaagaacttaatggaaaacaagatgaaccgaaaaatgaacagtaagtttggcatctagtccaaacaagactgaagaatgtgctgatggagcagtgctgtttctgcattcataatgcatttattggcccatatttttatgtaacctgttacaaaatagacttgactttttcataatggacttttgtattatacaagggactgttcactgctgtactggtttgcaaatttcttgaatttagctctttaatagctaactgtattattatcgttttatattttatattgctaaatagagaaccacactttatataaagtagtttttgcatttgtttattgaatgatgcatcttcttcggtgaaatatttatatgcataaatggcaaaggaaagaaataatatatatttttatgtcattgagcaatattttttcaatgtgtacctgtcttatggaagaaatatgcaggtatataagaccacgattttctaagctgccatataagaatttttgtttttgtaaatggttaaatacatttcctgggtaacttaggaaattaagctttttcataaggcaacagatggtaaactgattgtcatgaatacccaaagatcatgtatataatcgaagtgtattagtaccatcccaaggtttttttctcatttaacatatttgtttcataattcagcaagtacagatgcaagcgcattgcacactttttcctttctaaacttaaagacaagtcaaaaagccattcttagaactagaggatttaagcagggtcggaattacgggtttgtatatatgtatatactcgtttgtatatatgtatatactgggacattttatcttctggcccaaagtcagaactttataaaaatcttgagtttgttcacttaatgtgaaataagctatgtgtccagggtattgctcccctgagtgtatatgagtgctgagtagtattgcagagaatgtgatgagttatcactgtcacaactttttctatagaaaacaggggctgcttttaaactctcactatgggacactttaccaaaatacttccatatcaattatttgaacccggtagtttgtttgacctagttagattgtggtgtttattcaagtttgaaatcatgtttgacaatactgtaaattaggttaattttgaagtcttagcatcatcatattgtgctgttttggataacacgtttgttcaagaacatttaaactgtttctttggtgtcctttacattgaaataaattgtgtttgtgcctcc

SEQ ID NO: 233 - DNA, 2280 bp, Homo sapiens
ccgcccgccaccagctacgccccgtccgacgtgccctcgggggtcgcgctgttcctcaccatccctttcgccttcttcctgcccgagctgatatttgggttcttggtctggaccatggtagccgccacccacatagtataccccttgctgcaaggatgggtgatgtatgtctcgctcacctcgtttctcatctccttgatgttcctgttgtcttacttgtttggattttacaaaagatttgaatcctggagagttctggacagcctgtaccacgggaccactggcatcctgtacatgagcgctgccgtcctacaagtacatgccacgattgtttctgagaaactgctggacccaagaatttactacattaattcggcagcctcgttcttcgccttcatcgccacgctgctctacattctccatgccttcagcatctattaccactgatgcacaggcgccaggccaagggggaaatgctctttgaaagctccaattattggtccccaaaagcagcttccaacgtttgccatctggatgacaaacggaagatccactaaaacgtccacgggattaacagaacgtccttgcagactgagcgatgacaccacactttgtttggacatttaaattcactctgctgaataggaggaagcttttctttttcctgggaaaacaactgtctcttggaattatctgaccatgaacttgctcttctagacaactcacatcaaagccctcactccactaatggagaatcctagccccactaatgccaagtctgtttggggattttgcctcagctatgggcttccctagagtaggtctaggggaatactcagtctgatcttttttttgtttgttttattttgttttttttgagacggagtctcgctcttcctccaaggctggagtgcagtgacgcgatctccactcactgcaggctccgcctcccgggttcccgccattctcctgcctcagcctcccgagtagccgggactacaggcgcccaccaccatgcccggctaatttagttgtatttttagtagagatggggtttcaccgtattagccaggatggtctcgatctcctgacctcgtgatccgcccgcctcggcctcccaaagtgctgggattacaggcgtgagccaccgtgcccggcctgattctcttaaaattgaagaggtgctgccaaggccttcagatctaacgcagatgcatagaccttgttcctggtacttgttcagcctgtgctggggagccgtggtcccgagttccctgggaggctgacagggtcaagccaccctgcccaccaccctcccacttcccctcccctttcctctccagcattaggattcaagggaaatctgcatgaagccaattttgagggtagacgtgtggggaaaataaatcattatacagtaagacctggggcttgaggggtggggaatggggagggaagggcatagcctgctcctccatgagtctgacatctcggaaactgagcagctgccggacgcctgggtcaggaatccaagaccccacctcttaaggactggttcctcagaaagcaccctcagggaaaaaggtgaaaacattacatccgtggattctcctgccacaaccgcattggaagaaaaggctgccgcaacatctcagcgaggagtgaaggacccatgtcccaggaaccgcgctgcgccacctgcactcacccccctcacattctcttaagcacccggtggccctccgaggctggcggaatggtggtgcccacggggttgggcaagggctcaccaggacctcaacgggcaaagttgtgcacactaaaatatcaaatcaaggtgcttggttttaaagtaaatgtttttctaaagaaagctgtgttcttctgttgacccagacgaatagggcacagccctgtaactgcacgtgccttctgtcattgggaatgaaataaattattacgagaaagggacttgtcctaactggtttgaggccttacagttttgtatctacatttttcccctcctggggtttgcggggacagggacagaactacaggagtcatgggaaagaaaattctggcttcactactgctcactgctcactttctgatcactctgatactttttttttttttttttttttgcaacctgataccttgaaaagcttctatgtgtctctccttttgttgcctggcagctgtctaggatgatcactgattactatttactaagtagccacatgcaaataaaagttgtttggtaaaatggaaaaaaaaaaa

SEQ ID NO: 234 - DNA, 3875 bp, Homo sapiens
ggggaagggcagatggaggagggattgtaatggcggcagccggcagctccctgctctgacccacggcaggcacacagcaacgaccccttccccgcccctctcccggccggcctccgccccgcagccagcgcggggccaccctctccggcccttcccccagctgtcggcgtctcgccctgcgccccggccggggccccacacacaatggacgagcttgccggaggcggtggtggcggcccggggatggcggcccctccccggcagcagcagggacctggggggaacctgggcctttcgcccggggggaacggagcggcgggcggcgggggtcctccggcctccgagggagcgggtcccgcggcaggccccgagctgtcccggccgcagcagaacactatcccggggatactgcactacatccagcacgagtgggctcggttcgagatggagcgggcgcactgggaggtggaacgggccgaactgcaggcccggattgcatttctacaaggcgaaagaaaaggtcaagagaacctgaagaaggacttagtaagaagaataaagatgttagagtatgcattaaaacaagaaagggcaaaatatcacaaattaaaatatggcacggaactgaaccaaggtgacttgaaaatgccaacctttgagtcagaagaaaccaaagacacagaggctcccacagcacctcagaatagccagttaacgtggaagcaaggcagacagcttttaagacagtatcttcaggaagtaggttatacagatacaatattagatgtccggtctcagcgggtaaggtcattacttggactatctaattcagaaccaaatggatcagtagaaacaaagaatttagaacagatcctgaatggaggtgaatctcctaagcaaaagggacaagaaataaaaaggtcctctggtgatgttcttgagacgttcaatttcttagaaaatgccgatgacagtgatgaagatgaggaaaatgacatgatcgaaggcatcccagaaggaaaagacaaacatcggatgaataaacataaaataggtaatgaaggtttagctgctgacctaactgacgatcctgatactgaggaagcactgaaagaatttgattttttagtgactgctgaagatggtgaaggagctggagaagcacggagttcgggggatggcacagaatgggctgaaccaataacgtttccatctggaggaggcaagtcatttattatgggttctgatgatgttttgttaagtgtactgggccttggagaccttgcagacttgacggtaacaaatgatgcagactatagttatgatttgcctgctaataaagatgcctttcgaaagacatggagtcccaagtatacactacgtagccattttgatggagtacgggcattagcttttcatcctgtagaacctgtgctggttactgcttctgaggaccataccctgaaactttggaacctgcaaaaaacagttcctgccaaaaagagtgcctctttagatgtagagcctatctacacatttagggcccacatcggccctgttctgtcattagctattagttctaatggagaacagtgttttagtggtggtattgatgcaaccatccagtggtggaatatgccgagtcccagtgtagatccatatgatacatatgagccaaatgttctagctggcactttagttggtcatacagatgcagtttggggtcttgcttatagtggcataaaaaatcaattactgtcttgttcagcagatggcactgttaggttatggaatccacaagaaaaattgccatgtatttgcacttacaatggagataaaaagcatggaatacctacatcagttgactttataggctgtgatccagctcatatggtaacctctttcaacactggtagtgcagtaatttatgatttagaaacatcacagtcattggtgatactttcatcacaggtagattctggtttacaatctaataatcatatcaacagagtagtaagtcatcccacacttcctgttacaataactgctcatgaagatagacacatcaaattttttgacaataaaacgggtaaaatgatccattctatggtagctcacttggatgctgttacaagtctagcagtagatcctaatggaatctatttgatgtctggaagccatgactgttccatcagattatggaatttagacagcaagacatgtgtgcaagaaataacagctcacagaaagaaattggatgaatcaatttatgatgttgctttccactcgtcaaaagcatatatagctagtgcaggagctgatgctcttgccaaagtatttgtatgaatcaacaaaaacttgcatcgtaacaagatttgcttggacagaaagagggtctgcatcactgccatcagaaaggttactgatatgacactacatgtgatctgcctggtgaaggctatctggggcaggcacaaattggtggaaatcacatcttaatgtcaagctcattaagttaactgtaattactgtattttgtgggacaaagaaaaaaggactccagtatttgtggcctgtactggatgtgaactgagcgtatatctgtttttaggtgtctttaagccaatgtggagtctgatctttcaaaaaagttttttttttctcttcttcttcttcttttttttttttttttttttttttttttggactctgtgtgctgccttaggggttaggaatgtggtgctcttgttgggggaagtgagctccaagagtagctttttttcatctcttagtgatcttctgtttatcggttgaatgccacagattcccttttaaacttattttgctttaaaaaaaaaaaaaaaagaaaaagaaaatttaacttaaaatattttagcattagttgcacaaaatgtttggataaaattctagtttttataagtctttttatatatttagcctgtcacaacagtgctcaagattgtattgaagtttttctgcattatacaaccctaaaacacagagatctcactgacccgttgccctgtaaccactttctttccttcttttgcctaatacagctcagctaagtccttccataaagatgctaaataactttcatcatcacataaatgtcttcataaaccaaggactattaagtgtattaaaatgaaacagtggggtttagtactccaaatgaactcttaaagaaaaaaactaatcttggcatcctatcactatgtgatattttgtacatcttactgtattcacaagtttatttatcaaggattatccatcttgctaatggcctattatttatttcactttttgttggtctttatatccttttattaatgtgctaaaggaacctgtatatctattttggaactctttgaatagtctaaaatagactaaaaatggagtattttatagtttaaattacaaaccaaggtggttccccctaagatatatatcttggtttaccatgattccaaacaaaactaacttgtttaaaaatatttggagtaaagttttatttgcattacaaataggatacaaaaatagttgaatcaggatacagaaatctgctgtgttttgactagttatccctgttttatttttttagatgtgcttaatttatggtgtaactaaagattttgtttgtgtaatgcatgattaagacaataaagtattttttctagtcttccgagaaacttttctgatcagtttgcgagttttgatgagttttgtaaggtttttgttttacaaactatgaatcagcaaatttttaagattgtaccacatagcaaacatacagctgttgaaaaataatgtatataaaatgcatataataaatattaaattgtgtacctgta

SEQ ID NO: 235 - DNA, 1545 bp, Homo sapiens
ccgagggcggggccgggcccgggagcctgtggcttcaggaagaggagggcaaggtgtctggctgcgcgtttggctgcaatgagctcggcctcggggctccgcagggggcacccggcaggtggggaagaaaacatgacagaaacagatgccttctataaaagagaaatgtttgatccggcagaaaagtacaaaatggaccacaggaggagaggaattgctttaatcttcaatcatgagaggttcttttggcacttaacactgccagaaaggcggcgcacctgcgcagatagagacaatcttacccgcaggttttcagatctaggatttgaagtgaaatgctttaatgatcttaaagcagaagaactactgctcaaaattcatgaggtgtcaactgttagccacgcagatgccgattgctttgtgtgtgtcttcctgagccatggcgaaggcaatcacatttatgcatatgatgctaaaatcgaaattcagacattaactggcttgttcaaaggagacaagtgtcacagcctggttggaaaacccaagatatttatcatccaggcatgtcggggaaaccagcacgatgtgccagtcattcctttggatgtagtagataatcagacagagaagttggacaccaacataactgaggtggatgcagcctccgtttacacgctgcctgctggagctgacttcctcatgtgttactctgttgcagaaggatattattctcaccgggaaactgtgaacggctcatggtacattcaagatttgtgtgagatgttgggaaaatatggctcctccttagagttcacagaactcctcacactggtgaacaggaaagtttctcagcgccgagtggacttttgcaaagacccaagtgcaattggaaagaagcaggttccctgttttgcctcaatgctaactaaaaagctgcatttctttccaaaatctaattaattaatagaggctatctaatttcacactctgtattgaaaatggctttctcagccaggcgtggttactcacacctgtaatcccagcactttgggagtccaaggtgggcggatcacctgaggtcgggagttcgagaccagcctgaccaacatggcagaagccccgcctctactaaaaatgcaaaaaaaaatttagctaggcatggcggcgcatgcctgcaatcccagctacttggaaggctgaggcaggagaatcacttgaacccaggaggtggaggctgcggtgagccgagcattgcgccattgcactccagcctgggcaacgagtgaaactccgtctcaaaaaaaaagaaaatgtctttctcttccttttatataaatatcgttagggtgaagcattatggtctaatgattcaaatgttttaaagtttaatgcctagcagagaactgccttaaaaaaaaaaagttcatgttggccatggtgaaagggtttgatatggagaaacaaaatcctcaggaaattagataaataaaaatttataagcatttgtattattttttaataaactgcagggttacacaaaaatct

SEQ ID NO: 236 - DNA, 4409 bp, Homo sapiens
tttcgactcgcgctccggctgctgtcacttggctctctggctggagcttgaggacgcaaggagggtttgtcactggcagactcgagactgtaggcactgccatggcccctgtgctcagtaaggactcggcggacatcgagagtatcctggctttaaatcctcgaacacaaactcatgcaactctgtgttccacttcggccaagaaattagacaagaaacattggaaaagaaatcctgataagaactgctttaattgtgagaagctggagaataattttgatgacatcaagcacacgactcttggtgagcgaggagctctccgagaagcaatgagatgcctgaaatgtgcagatgccccgtgtcagaagagctgtccaactaatcttgatattaaatcattcatcacaagtattgcaaacaagaactattatggagctgctaagatgatattttctgacaacccacttggtctgacttgtggaatggtatgtccaacctctgatctttgtgtaggtggatgcaatttatatgccactgaagagggacccattaatattggtggattgcagcaatttgctactgaggtattcaaagcaatgagtatcccacagatcagaaatccttcgctgcctcccccagaaaaaatgtctgaagcctattctgcaaagattgctctttttggtgctgggcctgcaagtataagttgtgcttcctttttggctcgattggggtactctgacatcactatatttgaaaaacaagaatatgttggtggtttaagtacttctgaaattcctcagttccggctgccgtatgatgtagtgaattttgagattgagctaatgaaggaccttggtgtaaagataatttgcggtaaaagcctttcagtgaatgaaatgactcttagcactttgaaagaaaaaggctacaaagctgctttcattggaataggtttgccagaacccaataaagatgccatcttccaaggcctgacgcaggaccaggggttttatacatccaaagactttttgccacttgtagccaaaggcagtaaagcaggaatgtgcgcctgtcactctccattgccatcgatacggggagtcgtgattgtacttggagctggagacactgcctttgactgtgcaacatctgctctacgttgtggagctcgccgtgtgttcatcgtcttcagaaaaggctttgttaatataagagctgtccctgaggagatggaacttgctaaggaagaaaagtgtgaatttctgccattcctgtccccacggaaggttatagtaaaaggtgggagaattgttgctatgcagtttgttcggacagagcaagatgaaactggaaaatggaatgaagatgaagatcagatggtccatctgaaagccgatgtggtcatcagtgcctttggttcagttctgagtgatcctaaagtaaaagaagccttgagccctataaaatttaacagatggggtctcccagaagtagatccagaaactatgcaaactagtgaagcatgggtatttgcaggtggtgatgtcgttggtttggctaacactacagtggaatcggtgaatgatggaaagcaagcttcttggtacattcacaaatacgtacagtcacaatatggagcttccgtttctgccaagcctgaactacccctcttttacactcctattgatctggtggacattagtgtagaaatggccggattgaagtttataaatccttttggtcttgctagcgcaactccagccaccagcacatcaatgattcgaagagcttttgaagctggatggggttttgccctcaccaaaactttctctcttgataaggacattgtgacaaatgtttcccccagaatcatccggggaaccacctctggccccatgtatggccctggacaaagctcctttctgaatattgagctcatcagtgagaaaacggctgcatattggtgtcaaagtgtcactgaactaaaggctgactttccagacaacattgtgattgctagcattatgtgcagttacaataaaaatgactggacggaacttgccaagaagtctgaggattctggagcagatgccctggagttaaatttatcatgtccacatggcatgggagaaagaggaatgggcctggcctgtgggcaggatccagagctggtgcggaacatctgccgctgggttaggcaagctgttcagattcctttttttgccaagctgaccccaaatgtcactgatattgtgagcatcgcaagagctgcaaaggaaggtggtgccaatggcgttacagccaccaacactgtctcaggtctgatgggattaaaatctgatggcacaccttggccagcagtggggattgcaaagcgaactacatatggaggagtgtctgggacagcaatcagacctattgctttgagagctgtgacctccattgctcgtgctctgcctggatttcccattttggctactggtggaattgactctgctgaaagtggtcttcagtttctccatagtggtgcttccgtcctccaggtatgcagtgccattcagaatcaggatttcactgtgatcgaagactactgcactggcctcaaagccctgctttatctgaaaagcattgaagaactacaagactgggatggacagagtccagctactgtgagtcaccagaaagggaaaccagttccacgtatagctgaactcatggacaagaaactgccaagttttggaccttatctggaacagcgcaagaaaatcatagcagaaaacaagattagactgaaagaacaaaatgtagctttttcaccacttaagagaaactgttttatccccaaaaggcctattcctaccatcaaggatgtaataggaaaagcactgcagtaccttggaacatttggtgaattgagcaacgtagagcaagttgtggctatgattgatgaagaaatgtgtatcaactgtggtaaatgctacatgacctgtaatgattctggctaccaggctatacagtttgatccagaaacccacctgcccaccataaccgacacttgtacaggctgtactctgtgtctcagtgtttgccctattgtcgactgcatcaaaatggtttccaggacaacaccttatgaaccaaagagaggcgtacccttatctgtgaatccggtgtgttaaggtgatttgtgaaacagttgctgtgaactttcatgtcacctacatatgctgatcttttaaaatcatgatccttgtgttcagctctttccaaattaaaacaaatatacattttctaaataaaaatatgtaatttcaaaatacatttgtaagtgtaaaaaatgtctcatgtcaatgaccattcaattagtggtcataaaatagaataattcttttctgaggatagtagttaaataactgtgtggcagttaattggatgttcactgccagttgtcttatgtgaaaaattaacttttttgtggcaattagtgtgacagtttccaaattgccctatgctgtgctccatatttgatttctaattgtaagtgaaattaagcattttgaaacaaagtactctttaacatacaagaaaatgtatccaaggaaacattttatcattaaaaattacctttaattttaatgctgtttctaagaaaatgtagttagctccataaagtacaaatgaagaaagtcaaaaaattatttgctatggcaggataagaaagcctaaaattgagtttgtagaactttattaagtaaaatccccttcgctgaaattgcttatttttggtgttggatagaggatagggagaatatttactaactaaataccattcactactcatgcgtgagatgggtgtacaaactcatcctcttttaatggcatttctctttaaactatgttcctaacaaaatgagatgataggatagatcctggttaccactcttttgctgtgcacatacgggctctgactggttttaatagtcaccttcatgattatagcaactaatgtttgaacaaagctcaaagtatgcaatgcttcattattcaagaatgaaaaatataatgttgataatatatattaagtgtgccaaatcagtttgactactctctgttttagtgtttatgtttaaaagaaatatattttttgttattattagataatatttttgtatttctctattttcataatcagtaaatagtgtcatataaactcatttatctcctcttcatggcatcttcaatatgaatctataagtagtaaatcagaaagtaacaatctatggcttatttctatgacaaattcaagagctagaaaaataaaatgtttcattatgcacttttagaaatgcatatttgccacaaaacctgtattactgaataatatcaaataaaatatcataaagcatttt

SEQ ID NO: 237 - DNA, 846 bp, Homo sapiens
ccacgtccggggtgccgagccaactttcctgcgtccatgcagccccgccggcaacggctgcccgctccctggtccgggcccaggggcccgcgccccaccgccccgctgctcgcgctgctgctgttgctcgccccggtggcggcgcccgcggggtccgggggccccgacgaccctgggcagcctcaggatgctggggtcccgcgcaggctcctgcagcagaaggcgcgcgcggcgcttcacttcttcaacttccggtccggctcgcccagcgcgctgcgagtgctggccgaggtgcaggagggccgcgcgtggattaatccaaaagagggatgtaaagttcacgtggtcttcagcacagagcgctacaacccagagtctttacttcaggaaggtgagggacgtttggggaaatgttctgctcgagtgtttttcaagaatcagaaacccagaccaaccatcaatgtaacttgtacacggctcatcgagaaaaagaaaagacaacaagaggattacctgctttacaagcaaatgaagcaactgaaaaaccccttggaaatagtcagcatacctgataatcatggacatattgatccctctctgagactcatctgggatttggctttccttggaagctcttacgtgatgtgggaaatgacaacacaggtgtcacactactacttggcacagctcactagtgtgaggcagtgggtaagaaaaacctgaaaattaacttgtgccacaagagttacaatcaaagtggtctccttagactgaattcatgtgaacttctaatttcatatcaagagttgtaatcacatttatttcaataaatatgtgagttcctgc

SEQ ID NO: 238 - DNA, 1460 bp, Homo sapiens
gttctccacaactgccagcaatccttccaccaggcaaaacacatcatctaaggaaaagaagtgaggtttgcttagggcgtggcagcttcggataaacgcaggactccgcctggcagcccgatttctcccggaacctctgctcagcctggtgaaccacacaggcccgagtttcacccagtccccactccacggtgcagctgcggcttatctctcagcccagcgagatgccagccttcctgtcccgggccagcgctctgacatgcagaaggtgaccctgggcctgcttgtgttcctggcaggctttcctgtcctggacgccaatgacctagaagataaaaacagtcctttctactatgactggcaccaggttggcgggctcatctgcgctggggttctgtgcgccatgggcatcatcatcgtcatgagtgagtggaggagctcgggggagcaggcgggccggggctggggctcccctcccctgaccactcagctctccccaacaggtgcaaaatgcaaatgcaagtttggccagaagtccggtcaccatccaggggagactccacctctcatcacccccggctcagcccaaagctgatgaggacagaccagctgaaattgggtggaggaccgttctctgtccccaggtcctgtctctgcacagaaacttgaactccaggatggaattcttcctcctctgctgggactcctttgcatggcagggcctcatctcacctctcgcaagagggtctctttgttcaatttttttttatctaaaatgattgtgcctctgcccaagcagcctggagacttcctatgtgtgcattggggtggggcttggggcaccatgagaaggttggcgtgccctggaggctgacacagaggctggcactgagcctgcttgttgggaaaagcccacaggcctgttcccttgtggcttgggacatggcacaggcccgccctctgcctcctcagccatgggacctcatatgcaatttgggatttactagtagccaaaaggaatgaaagagagctctaaccagatggaacactggaacattccagtggaccctggaccattccaggaaaactgggacataggatcgtcccgctatgatggaagtgttcagacagtttataatagtaagcccctgtgaccctctcacttaccccgagacctcactttattacaagatctttccaaatacccaaatatccctgcaagcccgttaaataattccctatgctacccttaataacatacaatgaccacatagtgtgagaacttccaacaagcctcaaagtcccttgagactccccaatacctaataaggcatgcgaaatgttctcatgaactaccccacaacacgcctaaaactcaaaacacccaaaaatatctcctccaatgtcctgagacatgaacccaaaaagagacccacaataaactcgtgacttgtcccctc

SEQ ID NO: 239 - DNA, 1903 bp, Homo sapiens
gggacgcgctacctgcctccgggcgcctgggcttcaggatgaaggaccgtctggagcagctgaaggccaagcagctgacacaggatgatgatactgatgcggttgagattgctatcgacaacacggcttttatggacgagttcttttctgagattgaggaaactcggcttaacattgacaagatctcagaacatgtagaggaggctaagaaactctacagtatcattctctctgcaccgattccagagccaaaaaccaaggatgacctagagcagctcacgactgagattaagaaaagggccaacaacgtccggaacaaactgaagagcatggagaagcatattgaagaagatgaggtcaggtcatcggcagaccttcggattcggaaatcccagcactctgtcctttctcggaagtttgtggaggtgatgaccaaatacaatgaagctcaagtggacttccgagaacgcagcaaagggcgaatccagcggcacgtcgaaattactggcaaaaagacaaccgatgaggagctggaggagatgttggagagtggcaacccggccatcttcacttctgggatcattgactcacagatttccaagcaagccctcagtgagattgagggacgacacaaggacattgtgaggctggagagcagcatcaaggagcttcacgacatgtttatggacatcgccatgctggtggagaatcagggtgagatgttagataacatagagttgaatgtcatgcacacagtggaccacgtggagaaggcacgagatgaaagcaaaaaagctgtgaaataccagagtcaggcccggaagaaattgataattatcattgtgctagtagttgtgttgctgggcattttagcattgattattggactttccgttgggctgaattaagagtggcctaagaggctgctgcactgaaataaactgatttcactccagactggtgtggccacccttgtcttcagatgagaatggagtctgaatggccttcctgagagcgagtgcgacccgttcctttgtttccttgcaaccacccttggacctgactcagctaacaatctagccctgggggaatgtgatctacctgatgcgaccctgagttctccccagagcctcctcctgccccaccagctctcaagtaccttttctcctggactgtgtggacccacccagctttcttcctccctgttgtgtgtcagattatgccttgcacttgggaaagctcttgtgagactctcccaaggtgctgtattttcctacctcaggagtattctccagaaactgcaatgtatttttttaggggagtatctttaacaaagcagaatgattcttctaagtttggcaacaagaaggcttggatctgagtcttctacctggcaggatgccaatcctgtttgttgtccgtatgtcctgaaaacatgagggactggcagatgtcattttggtctaaagagctgacttgtttgaaattcagccttaaattaagctcttagttgttcagcttggggggcaactttgatttttctctgtgttgtagtctctcatatttactcaaggaggaccaggatgatacagtcatctgaggttatgctttgcaaaaggctgacggtatggaatatgtttccatgtctgagtcttagaaactggctgctcattgttagaaagtgatgctttgtgagactattgtcttggggccaaaaataatcagggattttaaattgggcaagggagaaggtgctagaatcctaagctctggaaatatttcatgacactggtgtttcactcatgtgttccagatgtattctaattgtgtatgaaatgtatgtacacataagtgtgtgtgtctcaggaagtaggaaataaaaatggaagctattatgacctca

SEQ ID NO: 240 - DNA, 1592 bp, Homo sapiens
ggcacgagtcgaagagctcctggacgcagaggccctgcccttgccagacggcgcagacatgtcagaacaaagtaaggatctgagcgaccctaactttgcagccgaggcccccaactccgaggtgcacagcagccctggggtttcggagggggttcctccgtccgcgaccctggcagagccgcagagccctcctctaggcccgacggccgctccgcaggccgcgccgcctccccaggccccgaacgacgagggcgacccgaaggccctgcagcaggctgcggaggagggccgcgcccaccaggccccgagcgcggcccagccgggcccggcaccgccagccccggcgcagctggtgcagaaggcgcacgagctcatgtggtacgtgctggtcaaggaccagaagaagatgatcatctggtttccagacatggtgaaagatgtcatcggcagctacaagaagtggtgcaggagcatcctccggcgcaccagcctcatcctcgcccgggtgttcgggctgcacctgaggctaaccagcctgcacaccatggagtttgcgctggtcaaagcgctggagcccgaggagctggacagggtggcgctgagcaaccgcatgcccatgacaggcctcctgctcatgatcctgagcctcatctacgtgaagggccgcggcgccagagagagcgccgtctggaacgtgctgcgcatcctggggctgcggccctggaagaagcactccaccttcggggacgtgcggaagctcatcactgaggagttcgtccaaatgaattacctgaagtaccagcgcgtcccatacgtggagccgcccgaatacgagttcttttggggctcccgggccagccgcgaaatcaccaagatgcaaatcatggagttcctggccagggtctttaagaaagacccccaggcctggccctcccgatacagagaagctctggaggaggccagagctctgcgggaggctaatcccactgcccactaccctcgcagcagtgtctctgaggactagcaaagtctggaggcagatgaatggtttctgaccctcaccagggctgtggaagggtgggggtgggtcattatagtattcaggatttacagtgcagtattcacgtgtaacttttaagttttcagtacagtgcttttatacctttaatgcaatgttgtattcatttgggtactattgtgtagtatttaggatgtatgcatgtttgtttatatgtaagcttggttggtgctttcgcttttgtgctacctttcttggatttttgtaccagagatgtgctaaactgatgaaatacattgagaaagtttccatcttattcttttatatgggactgatgatgtgtgttggggtagactgctcctgcagagtttggaagaagtcaccagcaaagccggcctaaccaagaaaagtcaaggcccttcatgaccttgctgggcacagaaaacaccctcgtggagtacactaatttgaactggactggtctcagtgtgagcacttggcacactttactaaacacatatacaaccccaccgtgagtcaactttaaagtaaacattaaagattcttgtgatac

SEQ ID NO: 241 - DNA, 4040 bp, Homo sapiens
gtccttcccacccttagtcccaggcatctgactaccgggaacctcagccagagtccgggagccccccaccccgtccaggagccaacagagcccccgtcttgctggcgtgagaatacattgctctcctttggttgaatcagctgtccctcttcgtgggaaaatgaaccagaagacaatcctcgtgctcctcattctggccgtcatcaccatctttgccttggtttgtgtcctgctggtgggcaggggtggagatgggggtgaacccagccagcttccccattgcccctctgtatctcccagtgcccagccttggacacaccctggccagagccagctgtttgcagacctgagccgagaggagctgacggctgtgatgcgctttctgacccagcggctggggccagggctggtggatgcagcccaggcccggccctcggacaactgtgtcttctcagtggagttgcagctgcctcccaaggctgcagccctggctcacttggacagggggagccccccacctgcccgggaggcactggccatcgtcttctttggcaggcaaccccagcccaacgtgagtgagctggtggtggggccactgcctcacccctcctacatgcgggacgtgactgtggagcgtcatggaggccccctgccctatcaccgacgccccgtgctgttccaagagtacctggacatagaccagatgatcttcaacagagagctgccccaggcttctgggcttctccaccactgttgcttctacaagcaccggggacggaacctggtgacaatgaccacggctccccgtggtctgcaatcaggggaccgggccacctggtttggcctctactacaacatctcgggcgctgggttcttcctgcaccacgtgggcttggagctgctagtgaaccacaaggcccttgaccctgcccgctggactatccagaaggtgttctatcaaggccgctactacgacagcctggcccagctggaggcccagtttgaggccggcctggtgaatgtggtgctgatcccagacaatggcacaggtgggtcctggtccctgaagtcccctgtgcccccgggtccagctccccctctacagttctatccccaaggcccccgcttcagtgtccagggaagtcgagtggcctcctcactgtggactttctcctttggcctcggagcattcagtggcccaaggatctttgacgttcgcttccaaggagaaagactagtttatgagataagcctccaagaggccttggccatctatggtggaaattccccagcagcaatgacgacccgctatgtggatggaggctttggcatgggcaagtacaccacgcccctgacccgtggggtggactgcccctacttggccacctacgtggactggcacttccttttggagtcccaggcccccaagacaatacgtgatgccttttgtgtgtttgaacagaaccagggcctccccctgcggcgacaccactcagatctctactcgcactactttgggggtcttgcggaaacggtgctggtcgtcagatctatgtccaccttgctcaactatgactatgtgtgggatacggtcttccaccccagtggggccatagaaatacgattctatgccacgggctacatcagctcggcattcctctttggtgctactgggaagtacgggaaccaagtgtcagagcacaccctgggcacggtccacacccacagcgcccacttcaaggtggatctggatgtagcaggactggagaactgggtctgggccgaggatatggtctttgtccccatggctgtgccctggagccctgagcaccagctgcagaggctgcaggtgacccggaagctgctggagatggaggagcaggccgccttcctcgtgggaagcgccacccctcgctacctgtacctggccagcaaccacagcaacaagtggggtcacccccggggctaccgcatccagatgctcagctttgctggagagccgctgccccaaaacagctccatggcgagaggcttcagctgggagaggtaccagctggctgtgacccagcggaaggaggaggagcccagtagcagcagcgttttcaatcagaatgacccttgggcccccactgtggatttcagtgacttcatcaacaatgagaccattgctggaaaggatttggtggcctgggtgacagctggttttctgcatatcccacatgcagaggacattcctaacacagtgactgtggggaacggcgtgggcttcttcctccgaccctataacttctttgacgaagacccctccttctactctgccgactccatctacttccgaggggaccaggatgctggggcctgcgaggtcaaccccctagcttgcctgccccaggctgctgcctgtgcccccgacctccctgccttctcccacgggggcttctctcacaactaggcggtcctgggatggggcatgtggccaagggctccagggccagggtgtgagggatggggagcagctgggcactgggccggcagcctggttccctctttcctgtgccaggactctctttcttccactaccctccctcgcatccgcctctgagccaggagcctcctgaccctgtgatgcctgacacaggggacactgaaccttgttgatgccagctgtactgagttctcatccacagaggccaggcatggcccagcctggagccgtggccgagggcttccctagatggttccctttgttgctgtctggctttcccgaatctttttaggccacctccaaggactctaaaagggggctattccctggagaccccagagtagggttgccagtcctgcaagtccatagctgagctggaaaggatgcttctgctcacattccctctcatccaggtcctttccttctcgtcttcctctctctcacctacttcctcctcctcctcctgttcctgccttctcttctatcctgcaatttctcccgaatcctgaggggatatccctatgtcccagcccctggtactcccccagccctcagttttcagtcaagttccgtctcctctccagccctatggaagtctcaaggtcacgggacccctaatcagagtggccaatccctgtgtgtcgttcccttgtgtctgttgcttattgggagtaggagttgctcctacccctgtcctggggctgggtgtgtttcaggacagctgcttctgtgcatttgtgtctgcctgcctcatgctctctatagaggaggatggtcatcgtgacagcagcagctcaagttagcatttcaagtgatttgggggtgcaatgataatgaagaatggccattttgtaccagggctctgtattctgcaacagcctgtttgggaggctggagtggaaacaaagggtgggcatcaaagatgagaagccaaagcccctacaactccagccacccagccaggaggggctgtccaatcacattcaggcatgcgaatgagctgggccctgggtgaggtgggggtctggcctagtggggaggggcctggcctgggtggggcagggcctggcctggtccaggcttgggctccattcccatcactgctgtccctcctgaggtctggattggggatggggacaaagaaatagcaagagatgagaaacaacagaaacttttttctctaaaggactggttaaatcaattctgatacagccttacaatacaatagtatgcagctaaaaaataattgtatgtctttatatactaatatgtaataatcttcaggtgaaaaaggcaagccacagaaatgtgtwtagcgcacttcccatttgtgtttcagaaaggagtagaatataaacacataattgcttatgtatgcctattcagaataaatgggtaacactgattacttttgggaggggaaccagtaggttgaggacaggagagggaagggtcttaacacttacacccttttgtacattttgaattttgaaccatgtgactgtattacctattcaaaataaacaataaatgggcccaaaaaaaaaaaaaaaaa

SEQ ID NO: 242 - DNA, 9358 bp, Homo sapiens
aagcttatggtgcaaccaaaaatctttcagtgttttttcctactcacactttatactgactgaatagagatcctgatggttgacactaccaatttcagctttggagaccccttcactcagtcatagctgcatgttttatagctgaagctattgggtttgtgacccctagctgacttgacccaggcttgcacagcagcaaccttctttgagaattccactttaattcagggcctctgctgccccatcaccaagataacatctcttatgttctcacctggtttcaacacaagcgaagttttccagggcagcagcatctacctaggtttgatggggtcagcttctcattctccagtgggtcacctttgccagcactgtaaacccaaattcaaggcagtgagagcctgaatactactcaatgcctcatctacggtttcccataggagtttgtctgtttcagggaaatctccctgaaaggcccacagctcccttattgcagccaggatctattgcaaaaaaaaaaaaccaaaaaaaaaaaaaaacaaacaaaaaaaacctctaagaccttctactgtctctcctagtggatctaaggcagacacgatggaccgcaggaggggctgagccataagacccagtttacgttgccattcttccttgacaagcattactagccgcacttcctcatctcccaagtgaaccagccaaactcctaatgatgtgcctggtttctgcccatagtggtcatgaatttccctccttccacacatctctgcaattgttgtctaaaagagggcagaatcttttatgtgcaccagacaatacctagtactagttgttacagtggggcagacctgagggtaactccaaattgttcaggaagttctacacctgcattagagttagcaagaaccagggcaccatttgagcagtggtctttgaatctgcttgctggtactcagcctgcatccacctcttcaatccccatcatgaacaggcaataaagtgaagaactatttatggcctagttgagcagataatttggtcaacatatttcagcgactttcttcaaatttgttttcttttttttttgaaacagggtctcgctctgttgcccaggctggagtgcagtggcgcgctcttgctcactgcagcctcgacttcccaggttcgagcgattctcccacctcagcctcccgagcagctgggaacacaggcacacatcaccatgcccagctaatttttgtatttttcgtagaggcaaggttttgccacgttgcccaggctggtctcaaactcctgagctcaagaaatctgcttgccttggcctcacaaattgctgggattacaggtgtgagccatcacgcccggccctcaaatttcattaaatttacccacaatatcctcatccttctccttctagaaagccatgtctctgtcagtatcccgccctcctcactaaagctgtcaagaactataaaaggtctgagattttgtcctactcaacaagctaacaagtcagcccactacagtttcatggaatctggtagaaaacatgacactcagagatgggcagtgttttgctgtagaaaggtcagtcaccagatatcaacattttggcaccagtttcttgagccccgattatgtaggggaactcctctgtgctggtgccctgaaaaccgtgcatatatcctcataggccatgtaagcaaagctcaactgcaagctgatccatgccgtggcagaaggctctgtgatcctccccaagcatgagaggataggcagtcttgtgaggagctgccataccgccatttctcacttgcctttctatttttttttcacagtagcaaggacatttattatataaataggtggataaaataagtgtgctttaacttctggatatatggcaaatgctactgtgatgcagtttttcagtgcagacatgtgactcttcaatgatggggatgggccccctagtgtgatgtgcagccactatactccatatggcaaacctcctggttcaaggcagagaggagacaccttattctatagaacaggatggggcttccaccctggggaccatacaagtggctcccataggcagccacgcctttctggcaagctgtggcatacccaggtgcaggctgggggaggggctggcacagcagccccagcgtgctctggcttcagcctgatggagaagcaaaactaggacctccctctcccagatgttgctgaccctatcgccacctccaccctctaccctgcgctgggagttcgctgtgacgcagcctgttccatagccatagggagaccaaagtgaacgatcacagtgcccctcacctattctaggggacttggatgctcagtagagcttaatgccatggcatctgagagcacccaccctgtccctgagggcagctgtgccgggccagggggccgcaagggcatgggtggaatcttggtcactggcagcactcagccacgtgcctgaggagctcttcaccttgttcgtcactgaagcactgcaggcagtgagggcactgaagttccccctggcctctctgggctgcgccaggatgcccgccctctgcagggggttccaaccgcctgggacccagtcccaggcctccagccaccaggcacgataagctccactgcatcggtggccaagtacttggcagttttgctcccagcgtgaatccagccggcgtctggctcttgagaatcctgtctccaggacacctggtgcagcaaagaggtgaccttttcctccagttcctgaatcctaccttgagcctgttcccgatctgccctttctgacatgaagtcatccttgtaagcgagaatctgctattccagtatctgcacccattccagtgcagcatcccgtgccgtcctcgaggctgccagcttctacgtcaattctgcacagtcgtttattttctcttccaactatctgttgagccgggagatctccttcctcatcagctcgggctcatgggggggggggggtctgcagccccctgagctgtgcatggagccccctcatgtattcgtccctgctgacatcgtatagctgccacttggcatagaggtcttcaacgtgagtcaccttctgttttaacagtcgattttcttcctcagtaacactctggacagaggtgtccctacctgtatgttctgactttcaggacttctctcccccacgttcctttgtgcatgctgtcgttcatccagacacttggccagatgctgacacatgtgggcagtggaggtcagcgtcctccgcagctggtgggtctcattggccaaggagctgcacagaacgtcactggcggggtggggcggttcgccctccgccatgctcctccgcatcagggcgacttccttctctcgctggtgctgtggctggctcagcagctgctgcatctccctctctttcgcttctagtcgctcagtaagcctctcaatttcctggcgcatctgggcctccgcggcgccgttctcctgccgctgcagctgctcccggaagtgcgccacctgctccagcagcgcatccaccagggacggcgcagtgtacccctccagcgcggccagcctggcgtggaggcacgcgatgagggagtcgcgggcggccagctggtcctgcaggcgccgcagccgctacccgacctggtagcacaggccgcagagctctgcagatgcgcgcggggccccctcccggccgtccgaccccgggtccccgcacgtgactgtgggcctgcctgggaggccgcacggccgccggcaacttcggtgcccggaccctgtcggctctctatcttgagggagtttctcatcgcctcttggttccaatgaggtgtgggactttccagcttgtcccctctcccttagggaggctaagctgcaggctataaaactacttagcagcagtatagaaatggctcctctggcgcggtggctcatgcctataatcccagcactttgggaggccgcagcgggtggatcacttgaggtcaggagttccagaccagcctggccaacatggtgaaaccctgtctctactaaaaatacaaaaattagcttggcgtggtgatgtgtgcctgtaatcccagctactcgggaagctgaggcaggagaatcacttgaacccgggaggtggaggttacagtgagccaagatcatgccccactacactgcagcctgggcaacagagcgagactgtctcccaaaaaaaaaaaatatatagaaagaaagaaagagagaaagatatagaaagaaagaaaaatgaaatgactcctcagcaacagggtgccccaacactcatgtttcttgtcatttggcctcttttgtttgggtgtcctattgtgggacaaggaatgcagggagctgacaacatgctgttgtttctttttctgtctatgtaagtaataaactgtctgaatctaatcagtgcttgttgtcctcttaccagccaaatctgtaagcctgctcaacacattctcacagggcaactctaaagaggaccaggtaacacctgcacgtgcagtggattacattataggagagaaaccctggacttagggaatctgaacctttcataatgggcagtaatcattcctgcccttcactccagagggaggctatttttattatagtggacagtaagcatgcttgcccttttctttggagggagacactacctctgtctttcaaggatgcactgtatacaaatatcctggaaaagatagtccggaacaaaggacagtacagtgccttacttgcaagatgtgcaagcacacaagacctatgaagaactgtctcccaacaaaggatacatgcagaaggagaaaaaactctcttaaacaaaaagaggcagagccggcagggaccgagcgggtgcctcagtctccttcccctcccctcgcctgtcctcgccatcttcttctcacagccggaccggaactatgtgatcccggaagttccgggtcctttggccctatatgatcccggaagttccggggcttttggacctctgtgattccggaagttccggggcgttccggggcgttctggggcctttggagcgtgggataagcagtaatggcggaggctgcagctcccggaacaacagtcacaacatcgggagcaggagcagcagcggcggaggcggcggagacggcggaagcagtctccccgactccgatccccacagtcaccgccccgtccccgagggcgggcggaggggtcggcggcagcgacggcagcgacggtagtggcggcaggggcgacagtggcgcgtatgacggcagcggtgcgtgcggcggcagcgacgcgtgcgatggcagcggcgacagcagcggcgacagctggactaaacaggtcacttgtagatattttaagtatgggatttgtaaggaaggagataactgtcgctactcgcatgacctctctgaccgtctgtgtggtgtagtgtgcaagtattttcagcgagggtgctgtgtttatggagaccgctgcagatgtgaacatagcaagccattgaaacaggaagaagcaactgctacagagctaactacaaagtcatcccttgctgcttcctcaagtctctcatcaatagttggaccacttgttgaaatgaatacaaacgaagctgagtcaagaaattcaaattttgcaactgtagtagcaggttcagaggactgggcgaatgccattgagtttgttcctgggcaaccctactgtggccgtactgtgccttcctgcactgaagcacccctgcagggctcagtgaccaaggaagaatcagaggaagagcaaaccgccgtggaaacaaagaagcagctgtgcccctatgctgcagtgggacagtgccgatatggggagaactgtgtgtatctccacggagatttatgtgacatgtgtgggctgcaggtcctgcatccgatggatgctgcccagagatcacagcatatacaagcgtgcattgaagcccatgagaaagacatggagttctcatttgctgtgcagcgcagcaaggacaaggtgtgtgggatctgcatggaggtggtctatgagaaagccaaccccaacgagcaccgcttcgggatcctctccaactgcaaccacaccttctgtctcaagtgcattcgcaagtggaggagtgctaaggaatttgagagcaggatcgtcaagtcctgcccacaatgccgaatcacatctaactttgtcattccaagtgagtactgggtggaggagaaagaagagaagcagaaactcattcagaaatacaaggaggcaatgagcaacaaggcatgcaagtattttgatgaaggacgtgggagctgcccatttggagagaactgtttttacaagcatatgtaccctgatggccgcagagaggagccacagagacagcaagtgggaacatcaagcagaaacccaggccaacaaaggaaccacttctgggaattctttgaggaaggagcgaacagcaacccctttgacgatgaagaagaggctgtcacctttgagctgggtgagatgttgcttatgctttaggctgcaggtggggacgacaaactgacagactctgaaaatgagtgggacttgttttgtgatgaagaattttatgtcttagatctatagaaaccttgcgtagtgtgtgagctggtctgctgaccccagatagcagctgtcccctgtggtggtgtggcagtgcctatgttctctcctaggcagacctatcaactccaggtgctgcggttaagaatatgtacccagggcctgtcttgtcaacccctcacctttccccaaggagtgtgttgttttccctgttggaaaaagttacaaaaataaatgttaaaggttttttttgttttttgttttattgagacagagtcccactctgtcacccaggctggagtgcagtggtgcaatcttggctcactgcaacctccgtcttccgggttcaagccattctcctgtctcagcctcccaagttgctgggactacaggtgcatgctacaatgcccagctaatttttctcatttttagtagaaacggggtttcaccatattggtcaggctggtctcgaactcctgacctcaggtgatccacctgccactaccttccaaagtgctgggattacaggcgtcagccaccatgcccagccttaaagttagttttttgtaacaggcatgagccaccgcgcctggctttaaagttcgttttttgtaacaggcataagccactgtgcctggccttaaagttagtttttttgtaacacgaatttaactgttggacagttagtttagatgtgttgcatcatctgttttcaaccagattgtgtttatggacttttcacacactaattttgaggaccccaggttcaaaagtaaaagcagtggccctgctttggggtccaataataggagtgatgggtgaagggacctaagctggccagtagccttctgctccagacatgggacgcggatccttgaggtttctggttaaatctgcacatctgtgtttttatatctgttccctacccctgtaatccctaccgcatgcactagttctgtagttttggtctctcgtttaattgtatgcaagtagtactactgggtaaccagagccaagcgtgaatgtgttcagatttctactgttttgcatgataggaaaattgagaaagaatacatataaaagatatagaggcataacatcaatgcagagttggaagttgacctccacggggtgacatggtgtgtgtgagtgtgggtgtgtgagtgtgggtgtgtgataagcttctcaaacctgcatagatgcagtattcttggctttggtagaaagccttggtttaaggctgggcgcggtggctcacgcctgtaatcccagcactttgggaggctgaggcggccggatcacaaggccaggagatcgagaccatcctgtgaatggcgaaaccctgtctctactaaaaatacaaaaaattagccgggcgtagtggcgggcgcctgtagtcccagctactctggaggctgaggcgggagaatggtgtgaacctgggaggcggagcttgcaatgaactgagaatgtgccactggactcccagcctgggtgacagagcgagactctgtctcaaacaaaaaaaaacaaaaacggaaacccttggtttaggggtttaagtcttatgtggtggttaagatcttaaaggacaaagcagtatattggtagttatcaatatagcagtactagctctgtttatataaatagagaaatggagttagccatagaggttaaaactacctggttatcccatatattaacccaaactgggtcttggatacacagttgtatttaatgttttacgatctagcctttccagtataggcacttcctgaaaaacctttgtcctcatttggggcattttgttgttgggtttcgccatgttggccaggctggtctcgaactcctgacctcaggtgatccacctgcctcagcctcccaaagtgctgggattacgggcatgagccaccacacccggccaggaaaaggtattttatatttatcattgctgtgctgtttattcatttgtataaattcaagttcccatctggtattgttttccttcagcatgaataacttctttgaacatttcttgtggttcatgtctgctggcaacaaattctctcagctatttatctggaaaagtctttatttcaccttcatatttcacctgtattttctttgtgtacagaattctaggttgacatttgttcctgagtgttttaaagatgtcatttcatattcttctggtttgcataatttctgatgagaagtctgcagtttattttctttctatttctctctctttttgctcctctgcaaagccaattcctcttgctatttttaatattttctcattatcattgtttcataggaatttgattatgattttccttggtatgatttccttaatatttattctatttgggaccattgagcttctcatagctgcatatctgtatgtttataattttcatccagtttaaaaaaaaagttttgagaaagagtctcactctgtcacccagtctaaagtacagtgacacgatcttggctcactgcaacctccgcctccctggttcaagtgattcttgtgcctcagtctcctgagtagctggaattacaagtgcatgccatcatgccctggtactttttgtttttacagtagagagggcgttttggccactactttcgtcctcaagtgtagccagctacctccggtttcccaggcgatatcctttggagagtttgggtgtgcagtgtctctagtctcatttgcttcatcgagatc

SEQ ID NO: 243 - DNA, 911 bp, Homo sapiens
ctgtcgcctgcagctgctcgcctgtctccgtcggaagggagcccaagctttgcagagaacatgaacgattggatgcccatcgccaaggagtatgatccactcaaagcgggcagcattgatggcaccgatgaagacccacacgaccgcgcggtctggagggcaatgctggcacgatatgtccccaacaaaggtgtcataggagatcccctcctcaccctgtttgtggccagactaaacttgcagaccaaggaggacaaattaaaggaagtcttttcccgctatggtgacatccggcggcttcggctggtcagggacttggtcacaggtttttcaaagggctacgccttcatcgaatacaaggaggagcgtgccgtgatcaaagcttaccgagatgctgatggcctggttattgaccagcatgagatatttgtggactacgagctggaaaggactctcaaagggtggatccctcggcgacttggaggcggtcttgggggaaaaaaggagtctgggcaactgagatttgggggacgggaccggccttttcgaaaacctattaacttgccagttgttaaaaacgacctctatagagagggaaaacgggaaaggcgggagcgatctcgatcccgagaaagacactgggactcgaggacaagggatcgagaccatgacaggggccgggagaagagatggcaagaaagagagccgaccagggtgtggcccgacaatgactgggagagagagagggacttcagagatgacaggatcaaggggagggagaagaaggaaagaggcaagtagaggcccaacagcagaaccccaaagtgaagttacagtggaaatgagtggagggggattgtctttcaacgcagcgtgagtctaatggttgaataaaacttactgatgaaaaa

SEQ ID NO: 244 - DNA, 2343 bp, Homo sapiens
  misc_feature (1)...(2343): n=a,t,g or c
gcgcggccccgaaccgccgccaggccggcacgggggaaggagccggtgggggtagggggtgcggtggggggtggggaccctccggctcttgggggtcccagtccccgccggctgctgagcgggtggggtggtggaggagctgcagagatgtccggccagagcctgacggaccgaatcactgccgcccagcacagtgtcaccggctctgccgtatccaagacagtatgcaaggccacgacccacgagatcatggggcccaagaaaaagcacctggactacttaattcagtgcacaaatgagatgaatgtgaacatcccacagttggcagacagtttatttgaaagaactactaatagtagttgggtggtggtcttcaaatctctcattacaactcatcatttgatggtgtatggaaatgagcgttttattcagtatttggcttcaagaaacacgttgtttaacttaagcaattttttggataaaagtggattgcaaggatatgacatgtctacatttattaggcggtatagtagatatttaaatgagaaagcagtttcatacagacaagttgcatttgatttcacaaaagtgaagagaggggctgatggagttatgagaacaatgaacacagaaaaactcctaaaaactgtaccaattattcagaatcaaatggatgcacttcttgattttaatgttaatagcaatgaacttacaaatggggtaataaatgctgccttcatgctcctgttcaaagatgccattagactgtttgcagcataccatgaaggaattattaatttgttggaaaaatattttgatatgaaaaagaaccaatgcaaagaaggtcttgacatctataagaagttcctaactaggatgacaagaatctcagagttcctcaaagttgcagagcaagttggaattgacagaggtgatataccagacctttcacaggcccctagcagtcttcttgatgctttggaacaacatttagcttccttggaaggaaagaaaatcaaagattctacagctgcaagcagggcaactacactttccaatgcagtgtcttccctggcaagcactggtctatctctgaccaaagtggatgaaagggaaaagcaggcagcattagaggaagaacaggcacgtttgaaagctttaaaggaacagcgcctaaaagaacttgcaaagaaacctcatacctctttaacaactgcagcctctcctgtatccacctcagcaggagggataatgactgcaccagccattgacatattttctacccctagttcttctaacagcacatcaaagctgcccaatgatctgcttgatttgcagcagccaacttttcacccatctgtacatcctatgtcaactgcttctcaggtagcaagtacatggggagatcctttctctgctactgtagatgctgttgatgatgccattccaagcttaaatcctttcctcacaaaaagtagtggtgatgttcacctttccatttcttcagatgtatctacttttactactaggacacctactcatgaaatgtttgttggattcactccttctccagttgcacagccacacccttcagctggccttaatgttgactttgaatctgtgtttggaaataaatctacaaatgttattgtagattctgggggctttgatgaactaggtggacttctcaaaccaacagtggcctctcagaaccagaaccttcctgttgccaaactcccacctagcaagttagtatctgatgacttggattcatctttagccaaccttgtgggcaatcttggcatcggaaatggaaccactaagaatgatgtaaattggagtcaaccaggtgaaaagaagttaactgggggatctaactgcgaaccaaaggttgcaccaacaaccgcttggaatgctgcaacaatggcaccccctgtaatggcctatcctgctactacaccaacaggcatgataggatatggaattcctccacaaatgggaagtgttcctgtaatgacgcaaccaaccttaatatacagccagcctgtcatgagacctccaaacccctttggccctgtatcaggagcacagatacagtttatgtaacttgatggaagaaaatggaattactccaaaaagacaagtgctcaagcagcaaaatccttacttccagcaaaatccaaactgctgtctcttaaatctcttaaactctcttcttccattaggatgctacaagtanctcagtgaaggcccatgaagggaattggggactagtttatagggngaacgtattcattacagtttataaaggccaggattggnttggattttaggattangttc

SEQ ID NO: 245 - DNA, 2267 bp, Homo sapiens
ctcgagctccccacttcctgggcttctggggctggggtcttagcatcttctcccaggcctcccctcccccataggtggctgccctggggccagggaaccgaagtcctgggggggtgagaggggcaggtggggagacgggtggccagactggtgggcaggaggccagagcaggccaggctctgggcccctctctctgtctttctgcgttggggcccagccctccgtagacaaccatgtgtcactgctgcctgggaaggacaggaagttgccgggtgggctgcgagttgtgagggattagagagcgggtgcccaggcaggggggtggggctgcggctcctgcccacctcgccatctgctggggtgcccacctgctgtctggggccgctcgccctctgcctctgctgggggggctctgtaacgtggtgtctggctcccctacctgcagagcaacggcaaaggcaaggactgcgtcttcacggagattgtgctggagaacaactacacagcgctgcagaatgccaagtacgagggctggtacatggccttcacccgcaagggccggccccgcaagggctccaagacgcggcagcaccagcgtgaggtccacttcatgaagcggctgccccggggccaccacaccaccgagcagagcctgcgcttcgagttcctcaactacccgcccttcacgcgcagcctgcgcggcagccagaggacttgggcccccgagccccgatagtgctgcctggccctccccacaatgccagaccgcagagaggctcatcctgtagggcacccaaaactcaagcaagatgagctgtgcgctgctctgcaggctggggaggtgctgggggagccctgggttccggttgttgatattgtttgctgttgggtttttgctgtttttttttttttttttttttttaaaacaaaagagaggctctatttttgtattccacttggctgtggtgtctgtcttcttaactctcagaaagctccattagtggcctagactgggattccggctgggggtttgcgggggtggggggctttctctagcctgtgctgctgaggccccagtacctccagggccagttggctgggcagccagggactccactgcacccccaggtggggcagggaggaaaggactgtgacatagggcagtcctcttagaagtgggtatcagactggtggctattaaatgattgaaatatttatttaacttgcatattaaaaatgtgtgctggagagtgagtcctgccggggtcagcccctccctccaaccttgccccagctggtgggcggctgggagacgcagatgaccaggtgccagctctgaccacagcctccctccagcctaaagacacctgcctgtcaaccatccccatcactgtcacttgaggggttttcctgcaaggacagaagcagggaaaggggcaagaagaggctcttagctagtccttggagctctcagatgtgtacctcctagcactttacagaggtcattgctaacacttccccaggccacctcagggccagaaataatggatgtgctagggctagagctgtaatcatggatttaatcctcttaaaaagtgcttctctgagtgcctaggtccatgtgggagacaggttggagattccagaacttgctctttctgagactcaggctccagaaaatgaaagaaaagagcagctgccagggtccaaggtgggggcatattggagggggaccaccaagactggtgttgacaatggtgatgtgggacaagtgttaaccttgggtgatatggtgagatagctgtgggcagaaagcactgagctgaggtgcggcgaggagcctggggaactgtcttccaggaagaggctgcccacctcggaggatgggctggcgggagaggagctgggcaccggatggcaccagaagggaagctcataggcctagcgcagaactaaaggcagtcatagccttggggagaagcaggaggccgtatgtggagggagggagggctgctgtgggagtggtggagcaggtcatggtgtgggcagagaagggaatgggcaagggtgcaggtgtgtgtttgcgtgtggactggtgagactggtgtcctgccacaccgagggagagcccaggccccacggcagtttcctgagtgcagagctggcccaggcttcatcgctgaggcctcccattagggctgctcctgcttccttccttgtggatgccctgggctggtcccacagcccagctactgagccagtctaga

SEQ ID NO: 246 - DNA, 2044 bp, Homo sapiens
ccggtcggatgccggaccgggggcaccgctgaggcggtgggtccccgacctgcgagacaggtttggaagcccccgctgcgcccagtccgtgcggaccgcgaggccgcgggcgggtggaggcgcgtctccggcacgatgaaggatttgggggcagagcacttggcaggtcatgaaggggtccaacttctcgggttgttgaacgtctacctggaacaagaagagagattccaacctcgagaaaaagggctgagtttgattgaggctaccccggagaatgataacactttgtgtccaggattgagaaatgccaaagttgaagatttaaggagtttagccaacttttttggatcttgcactgaaacttttgtcctggctgtcaatattttggacaggttcttggctcttatgaaggtgaaacctaaacatttgtcttgcattggagtctgttcttttttgctggctgctagaatagttgaagaagactgcaatattccatccactcatgatgtgatccggattagtcagtgtaaatgtactgcttctgacataaaacggatggaaaaaataatttcagaaaaattgcactatgaattggaagctactactgccttaaactttttgcacttataccatactattatactttgtcatacttcagaaaggaaagaaatactgagccttgataaactagaagctcagctgaaagcttgcaactgccgactcatcttttcaaaagcaaaaccatctgtattagccttgtgccttctcaatttggaagtggaaactttgaaatctgttgaattactggaaattctcttgctagttaaaaaacattccaagattaatgacactgagttcttctactggagagagttggtttctaaatgcctagccgagtattcttctcctgaatgttgcaaaccagatcttaagaagttggtttggatcgtttcaaggcgcacagcccagaacctccacaacagctactatagtgttcctgagctgccaacgatacctgaggggggttgttttgatgaaagtgaaagtgaggactcttgtgaagatatgagttgtggagaggagagtctcagcagctctcctcccagtgatcaagagtgcaccttctttttcaacttcaaagtggcacaaacactgtgctttccatcttagaaatctgattgttctgtcagaatttatatttacagggtttcaaagcaataaatgggggaataggtagtttcctggtttagcccccatctagtcaggaattaatatactggaatacctaccttctatttgttattcagatcagatctggcctattttcatatttatcctaagccatcaaatggggtagtgcctcttaaaccattaacagtactttagacattggcactttatttttctcgtagatctttagctactttggggaggagggaaggtgctgataccttcaatttgttacttttcaagatttttaaaaataactagtgtagcttatcttaaacattttataaaaccttcagatgtctttaagcagattggaagtatgcaagtgcttccttagcagggacagtggataatccttaatggtttatcatagatttcaccctccccccttctcagaagagtgagtatgctcttaaatgtcaaacacatttttgttgttttgttttttaaatgatcagtgtctatttgatgtgatgcagatcttataaatttgggaattataatattgacatttctgtgatttttatatatgtaatgtcttaattgagatttgtgttaaggcagaaataattaggctagggctcttagttttcattcctattgccccaagtattgtcaaactatggtattattttaatgttactttaaaaatccataatctgctagttttgcatgtacttatatgaaaacagtgcagtaagttgaaaactcagtatctatggaattgataaatgttgatctggtgtagtatattttatccgcattttcttatattaaaaaatgttctgcatgattacattttatttgcctttgt

SEQ ID NO: 247 - DNA, 5926 bp, Homo sapiens
ccggctgcctctgctgcagttcagagcaacttcaggagcttcccagccgagagcttcaggacgcctttcctgtcccactggcccagttgccacaacaaacaacagagaagacggtgaccatgggggatgtgaagctggttgcctcgtcacacatttccaaaacctccctcagtgtggatccctcaagagttgactccatgcccctgacagaggcccctgctttcattttgccccctcggaacctctgcatcaaagaaggagccaccgccaagttcgaagggcgggtccggggttacccagagccccaggtgacatggcacagaaacgggcaacccatcaccagcgggggccgcttcctgctggattgcggcatccgggggactttcagccttgtgattcatgctgtccatgaggaggacaggggaaagtatacctgtgaagccaccaatggcagtggtgctcgccaggtgacagtggagttgacagtagaaggaagttttgcgaagcagcttggtcagcctgttgtttccaaaaccttaggggatagattttcagcttcagcagtggagacccgtcctagcatctggggggagtgcccaccaaagtttgctaccaagctgggccgagttgtggtcaaagaaggacagatgggacgattctcctgcaagatcactggccggccccaaccgcaggtcacctggctcaagggaaatgttccactgcagccgagtgcccgtgtgtctgtgtctgagaagaacggcatgcaggttctggaaatccatggagtcaaccaagatgacgtgggagtgtacacgtgcctggtggtgaacgggtcggggaaggcctcgatgtcagctgaactttccatccaaggtttggacagtgccaataggtcatttgtgagagaaacaaaagccaccaattcagatgtcaggaaagaggtgaccaatgtaatctcaaaggagtcgaagctggacagtctggaggctgcagccaaaagcaagaactgctccagcccccagagaggtggctccccaccctgggctgcaaacagccagcctcagcccccaagggagtccaagctggagtcatgcaaggactcgcccagaacggccccgcagaccccggtccttcagaagacttccagctccatcaccctgcaggccgcaagagttcagccggaaccaagagcaccaggcctgggggtcctatcaccttctggagaagagaggaagaggccagctcctccccgtccagccaccttccccaccaggcagcctggcctggggagccaagatgttgtgagcaaggctgctaacaggagaatccccatggagggccagagggattcagcattccccaaatttgagagcaagccccaaagccaggaggtcaaggaaaatcaaactgtcaagttcagatgtgaagtttccgggattccaaagcctgaagtggcctggttcctggaaggcacccccgtgaggagacaggaaggcagcattgaggtttatgaagatgctggctcccattacctctgcctgctgaaagcccggaccagggacagtgggacatacagctgcactgcttccaacgcccaaggccaggtgtcctgtagctggaccctccaagtggaaaggcttgccgtgatggaggtggccccctccttctccagtgtcctgaaggactgcgctgttattgagggccaggattttgtgctgcagtgctccgtacgggggaccccagtgccccggatcacttggctgctgaatgggcagcccatccagtacgctcgctccacctgcgaggccggcgtggctgagctccacatccaggatgccctgccggaggaccatggcacctacacctgcctagctgagaatgccttggggcaggtgtcctgcagcgcctgggtcaccgtccatgaaaagaagagtagcaggaagagtgagtaccttctgcctgtggctcccagcaagcccactgcacccatcttcctgcagggcctctctgatctcaaagtcatggatggaagccaggtcactatgactgtccaagtgtcagggaatccaccccctgaagtcatctggctgcacaatgggaatgagatccaagagtcagaggacttccactttgaacagagaggaactcagcacagcctttggatccaggaagtgttcccggaggacacgggcacgtacacctgcgaggcctggaacagcgctggagaggtccgcacccaggccgtgctcacggtacaagagcctcacgatggcacccagccctggttcatcagtaagcctcgctcagtgacagcctccctgggccagagtgtcctcatctcctgcgccatagctggtgacccctttcctaccgtgcactggctcagagatggcaaagccctctgcaaagacactggccacttcgaggtgcttcagaatgaggacgtgttcaccctggttctaaagaaggtgcagccctggcatgccggccagtatgagatcctgctcaagaaccgggttggcgaatgcagttgccaggtgtcactgatgctacagaacagctctgccagagcccttccacgggggagggagcctgccagctgcgaggacctctgtggtggaggagttggtgctgatggtggtggtagtgaccgctatgggtccctgaggcctggctggccagcaagagggcagggttggctagaggaggaagacggcgaggacgtgcgaggggtgctgaagaggcgcgtggagacgaggcagcacactgaggaggcgatccgccagcaggaggtggagcagctggacttccgagacctcctggggaagaaggtgagtacaaagaccctatcggaagacgacctgaaggagatcccggccgagcagatggatttccgtgccaacctgcagcggcaagtgaagccaaagactgtgtctgaggaagagaggaaggtgcacagcccccagcaggtcgattttcgctctgtcctggccaagaaggggacttccaagacccccgtgcctgagaaggtgccaccgccaaaacctgccaccccggattttcgctcagtgctgggtggcaagaagaaattaccagcagagaatggcagcagcagtgccgagaccctgaatgccaaggcagtggagagttccaagcccctgagcaatgcacagccttcagggcccttgaaacccgtgggcaacgccaagcctgctgagaccctgaagccaatgggcaacgccaagcctgccgagaccctgaagcccatgggcaatgccaagcctgatgagaacctgaaatccgctagcaaagaagaactcaagaaagacgttaagaatgatgtgaactgcaagagaggccatgcagggaccacagataatgaaaagagatcagagagccaggggacagccccagccttcaagcagaagctgcaagatgttcatgtggcagagggcaagaagctgctgctccagtgccaggtgtcttctgaccccccagccaccatcatctggacgctgaatggaaagaccctcaagaccaccaagttcatcatcctctcccaggaaggctcactctgctccgtctccatcgagaaggcactgcctgaggacagaggcttatacaagtgtgtagccaagaatgacgctggccaggcggagtgctcctgccaagtcaccgtggatgatgctccagccagtgagaacaccaaggccccagagatgaaatcccggaggcccaagagctctcttcctcccgtgctaggaactgagagtgatgcgactgtgaaaaagaaacctgcccccaagacacctccgaaggcagcaatgccccctcagatcatccagttccctgaggaccagaaggtacgcgcaggagagtcagtggagctgtttggcaaagtgacaggcactcagcccatcacctgtacctggatgaagttccgaaagcagatccaggaaagcgagcacatgaaggtggagaacagcgagaatggcagcaagctcaccatcctggccgcgcgccaggagcactgcggctgctacacactgctggtggagaacaagctgggcagcaggcaggcccaggtcaacctcactgtcgtggataagccagaccccccagctggcacaccttgtgcctctgacattcggagctcctcactgaccctgtcctggtatggctcctcatatgatgggggcagtgctgtacagtcctacagcatcgagatctgggactcagccaacaagacgtggaaggaactagccacatgccgcagcacctctttcaacgtccaggacctgctgcctgaccacgaatataagttccgtgtacgtgcaatcaacgtgtatggaaccagtgagccaagccaggagtctgaactcacaacggtaggagagaaacctgaagagccgaaggatgaagtggaggtgtcagatgatgatgagaaggagcccgaggttgattaccggacagtgacaatcaatactgaacaaaaagtatctgacttctacgacattgaggagagattaggatctgggaaatttggacaggtctttcgacttgtagaaaagaaaactcgaaaagtctgggcagggaagttcttcaaggcatattcagcaaaagagaaagagaatatccggcaggagattagcatcatgaactgcctccaccaccctaagctggtccagtgtgtggatgcctttgaagaaaaggccaacatcgtcatggtcctggagatcgtgtcaggaggggagctgtttgagcgcatcattgacgaggactttgagctgacggagcgtgagtgcatcaagtacatgcggcagatctcggagggagtggagtacatccacaagcagggcatcgtgcacctggacctcaagccggagaacatcatgtgtgtcaacaagacgggcaccaggatcaagctcatcgactttggtctggccaggaggctggagaatgcggggtctctgaaggtcctctttggcaccccagaatttgtggctcctgaagtgatcaactatgagcccatcggctacgccacagacatgtggagcatcggggtcatctgctacatcctagtcagtggcctttcccccttcatgggagacaacgataacgaaaccttggccaacgttacctcagccacctgggacttcgacgacgaggcattcgatgagatctccgacgatgccaaggatttcatcagcaatctgctgaagaaagatatgaaaaaccgcctggactgcacgcagtgccttcagcatccatggctaatgaaagataccaagaacatggaggccaagaaactctccaaggaccggatgaagaagtacatggcaagaaggaaatggcagaaaacgggcaatgctgtgagagccattggaagactgtcctctatggcaatgatctcagggctcagtggcaggaaatcctcaacagggtcaccaaccagcccgctcaatgcagaaaaactagaatctgaagaagatgtgtcccaagctttccttgaggctgttgctgaggaaaagcctcatgtaaaaccctatttctctaagaccattcgcgatttagaagttgtggagggaagtgctgctagatttgactgcaagattgaaggatacccagaccccgaggttgtctggttcaaagatgaccagtcaatcagggagtcccgccacttccagatagactacgatgaggacgggaactgctctttaattattagtgatgtttgcggggatgacgatgccaagtacacctgcaaggctgtcaacagtcttggagaagccacctgcacagcagagctcattgtggaaacgatggaggaaggtgaaggggaaggggaagaggaagaagagtgaaacaaagccagagaaaagcagtttctaagtcatattaaaaggactatttctctcaaaatcca

SEQ ID NO: 248 - DNA, 600 bp, Homo sapiens
ccgactccagctctgacttttttcgcggctctcggcttccactgcagccatgtcactcctcttgctggtggtctcagcccttcacatcctcattcttatactgcttttcgtggccactttggacaagtcctggtggactctccctgggaaagagtccctgaatctctggtacgactgcacgtggaacaacgacaccaaaacatgggcctgcagtaatgtcagcgagaatggctggctgaaggcggtgcaggtcctcatggtgctctccctcattctctgctgtctctccttcatcctgttcatgttccagctctacaccatgcgacgaggaggtctcttctatgccaccggcctctgccagctttgcaccagcgtggcggtgtttactggcgccttgatctatgccattcacgccgaggagatcctggagaagcacccgcgagggggcagcttcggatactgcttcgccctggcctgggtggccttccccctcgccctggtcagcggcatcatctacatccacctacggaagcgggagtgagcgccgcgcctcgctcggctgcccccgccccttccgggcccccctgccgcgcgtcctcc

SEQ ID NO: 249 - DNA, 1475 bp, Homo sapiens
gtcaccgagtcgttggcgctgtcatggcgggtgtgctgaagaagaccactggccttgtgggattggctgtgtgcaatactcctcacgagaggctaagaatattgtacacaaagattcttgatgttcttgaggaaatccctaaaaatgcagcatatagaaagtatacagaacagattacaaatgagaagctggctatggttaaagcggaaccagatgttaaaaaattagaagaccaacttcaaggcggtcaattagaagaggtgattcttcaggctgaacatgaactaaatctggcaagaaaaatgagggaatggaaactatgggagccattagtggaagagcctcctgccgatcagtggaaatggccaatataattattaagtgactttggtgtgttcatgggaaactgatgtaattaaatattctgttatattaagagcgtgttcttattactgacattttgtaatcaagaaaagtgatatagaaaatatgtaggagactgttaaaattggtgattatggtaatatggtcatgtgaatcaatttttgatttataaagtactcacacaagttgtttcaaagatgatatttctgtgaacagagaggccatgggaagatttgaaaattattaaagaaaaattcctacagattttcaatgcagagaccataatcaaaaagtaaactttctttagtagtatgttcaatacatcatttaattttttaagttatcctgaagaaggaaaggtccttaattattatagtctaaacaaatttatagattactgtttgaagtaaataatacgagtgaatattttcaaatgtgataaaatagcacaagtggctggtgataaaatttgaaattatggttaacctcagctgtgatcttatgtatgtaaagtgaaatttaaatagataattataggttgattacaaaatccatagtgtcattttattttagtcattattgaattataccatttactctgttttcttatagtcttaattttattatattttgttgttactgtattatatttgaaaaccttcaaattagaatacattgtacagttaaagaaattgacttggtacttaaaagaaagatttcccattgcatacaggttattggagaaattttccttttgttgcatttgtggaagttagttttctggcccgtggcctttaattttcttaatcaacctaattacatcaggatagaggtagagtttctgtaaaagaagagacattaagagttcctgaaatttatatctggcataccgataggcttatattcaaaacatcttagtcatacgaccataaattaaaagtggagtcactaaatagtttgcagtacgtttctaatataagtgtaggtgggtatcaaaacaagacaaatgctgttcagggaaagaagttggcaagcttaaggttaaacaaaaataaaattacatgtgttttcgccttcctaaaaaaaaaaaa

SEQ ID NO: 250 - DNA, 1383 bp, Homo sapiens
ggagcgagctggcggcgccgtcgggcgccgggccgggccatggagctgtggccgtgtctggccgcggcgctgctgttgctgctgctgctggtgcagctgagccgcgcggccgagttctacgccaaggtcgccctgtactgcgcgctgtgcttcacggtgtccgccgtggcctcgctcgtctgcctgctgtgccacggcggccggacggtggagaacatgagcatcatcggctggttcgtgcgaagcttcaagtacttttacgggctccgcttcgaggtgcgggacccgcgcaggctgcaggaggcccgtccctgtgtcatcgtctccaaccaccagagcatcctggacatgatgggcctcatggaggtccttccggagcgctgcgtgcagatcgccaagcgggagctgctcttcctggggcccgtgggcctcatcatgtacctcgggggcgtcttcttcatcaaccggcagcgctctagcactgccatgacagtgatggccgacctgggcgagcgcatggtcagggagaacctcaaagtgtggatctatcccgagggtactcgcaacgacaatggggacctgctgccttttaagaagggcgccttctacctggcagtccaggcacaggtgcccatcgtccccgtggtgtactcttccttctcctccttctacaacaccaagaagaagttcttcacttcaggaacagtcacagtgcaggtgctggaagccatccccaccagcggcctcactgcggcggacgtccctgcgctcgtggacacctgccaccgggccatgaggaccaccttcctccacatctccaagaccccccaggagaacggggccactgcggggtctggcgtgcagccggcccagtagcccagaccacggcagggcatgacctggggagggcaggtggaagccgatggctggaggatgggcagaggggactcctcccggcttccaaataccactctgtccggctcccccagctctcactcagcccgggaagcaggaagccccttctgtcactggtctcagacacaggcccctggtgtcccctgcagggggctcagctggaccctccccgggctcgagggcagggactcgcgcccacggcacctctgggagctgggatgataaagatgaggcttgcggctgtggcccgctggtgggctgagccacaaggcccccgatggcccaggagcagatgggaggaccccgaggccaggagtcccagactcacgcaccctgggccacagggagccgggaatcggggcctgctgctcctgctggcctgaagaatctgtggggtcagcactgtactccgttgctgtttttttataaacacactcttggaaaaaaaaaaaaaaaaaaaaaaaaaaa

SEQ ID NO: 251 - DNA, 1023 bp, Homo sapiens
tcttgaagccagagcagcgccaggatgtcacgggagctggccccactgctgcttctcctcctctccatccacagcgccctggccatgaggatctgctccttcaacgtcaggtcctttggggaaagcaagcaggaagacaagaatgccatggatgtcattgtgaaggtcatcaaacgctgtgacatcatactcgtgatggaaatcaaggacagcaacaacaggatctgccccatactgatggagaagctgaacagaaattcaaggagaggcataacgtacaactatgtgattagctctcggcttggaagaaacacatataaagaacaatatgcctttctctacaaggaaaagctggtgtctgtgaagaggagttatcactaccatgactatcaggatggagacgcagatgtgttttccagggagccctttgtggtctggttccaatctccccacactgctgtcaaagacttcgtgattatccccctgcacaccaccccagagacatccgttaaggagatcgatgagttggttgaggtctacacggacgtgaaacaccgctggaaggcggagaatttcattttcatgggtgacttcaatgccggctgcagctacgtccccaagaaggcctggaagaacatccgcttgaggactgaccccaggtttgtttggctgatcggggaccaagaggacaccacggtgaagaagagcaccaactgtgcatatgacaggattgtgcttagaggacaagaaatcgtcagttctgttgttcccaagtcaaacagtgtttttgacttccagaaagcttacaagctgactgaagaggaggccctggatgtcagcgaccactttccagttgaatttaaactacagtcttcaagggccttcaccaacagcaaaaaatctgtcactctaaggaagaaaacaaagagcaaacgctcctagacccaagggtctcatcttattaaccatttcttgcctctaaataaaatgtctctaacagaaaaaaaaaaaaaaaaaaaaaaa

SEQ ID NO: 252 - DNA, 1990 bp, Homo sapiens
gaattccgggggtattggcagctgaggagtggaggctgggcagctccgactccctgacgccagcgcgaccagatcaatccaggctccaggagaaagcaggcgggcgggcggagaaaggagaggccgagcggctcaacccgggccgaggctcggggagcggagagtggcgcaccgcccggccgtccggacccgggccgcgagaccccgctcgcccggccactcgtgctcccgcacggacgggcgcgccgccaacccggtgctgactgggttacttttttaaacactaggaatggtaatttctactcttctggacttcaaactaagaagttaaagagacttctctgtaaataaacaaatctcttctgctgtccttttgcatttggagacagctttatttcaccatatccaaggagtataactagtgctgtcattatgaatgtgacaagtttattttcctttacaagtccagctgtgaagagacttcttgggtggaaacagggcgatgaagaagaaaaatgggcagagaaagctgttgatgctttggtgaaaaaactgaagaaaaagaaaggtgccatggaggaactggaaaaggccttgagctgcccagggcaaccgagtaactgtgtcaccattccccgctctctggatggcaggctgcaagtctcccaccggaagggactgcctcatgtcatttactgccgtgtgtggcgctggcccgatcttcagagccaccatgaactaaaaccactggaatgctgtgagtttccttttggttccaagcagaaggaggtctgcatcaatccctaccactataagagagtagaaagccctgtacttcctcctgtgctggttccaagacacagcgaatataatcctcagcacagcctcttagctcagttccgtaacttaggacaaaatgagcctcacatgccactcaacgccacttttccagattctttccagcaacccaacagccacccgtttcctcactctcccaatagcagttacccaaactctcctgggagcagcagcagcacctaccctcactctcccaccagctcagacccaggaagccctttccagatgccagctgatacgcccccacctgcttacctgcctcctgaagaccccatgacccaggatggctctcagccgatggacacaaacatgatggcgcctcccctgccctcagaaatcaacagaggagatgttcaggcggttgcttatgaggaaccaaaacactggtgctctattgtctactatgagctcaacaatcgtgtgggtgaagcgttccatgcctcctccacaagtgtgttggtggatggtttcactgatccttccaacaataagaaccgtttctgccttgggctgctctccaatgttaaccggaattccactattgaaaacaccaggcggcatattggaaaaggagttcatctttattatgttggaggggaggtgtatgccgaatgccttagtgacagtagcatctttgtgcaaagtcggaactgcaactaccatcatggatttcatcctactactgtttgcaagatccctagtgggtgtagtctgaaaatttttaacaaccaagaatttgctcagttattggcacagtctgtgaaccatggatttgagacagtctatgagcttacaaaaatgtgtactatacgtatgagctttgtgaagggctggggagcagaataccaccgccaggatgttactagcaccccctgctggattgagatacatctgcacggccccctccagtggctggataaagttcttactcaaatgggttcacctcataatcctatttcatctgtatcttaaatggccccagcatctgcctctggaaaactattgagccttgcatgtacttgaaggatggatgagtcagacacgattgagaactgacaaaggagccttgataatacttgacctctgtgaccaactgttggattcagaaatttaaacaaaaaaaaaaaaaaaa

SEQ ID NO: 253 - DNA, 2088 bp, Homo sapiens
gtttgagcagcattgttagagcctgtggaaaacactttacaactgtgtaactgtcttcatctttacagaggaatagtctacaaaggaagacttgtaacctggagaagagacctgtcatttactccatcctttatagtgatgctacaggacgaagaggaatggataaaaacattggcgagcaactcaataaagcgtatgaagccttccggcaggcatgcatggatagagattctgcagtaaaagaattacagcaaaagactgagaactatgagcagagaatacgtgaacaacaggaacagctgtcactccaacagactattattgacaagctaaaatctcagttacttcttgtgaattccactcaagataacaattatggctgtgtccctctgcttgaagacagtgacacaagaaagaatactttgactcttgctcagccacaagataaagtgatttcaggaatagcaagagaaaaactaccaaaggtaagaagacaagaggtttcttctcctagaaaagaaacttcagcaaggagtcttggcagtcctttgctccatgaaaggggtaatatagagaagacttcctgggatctgaaagaagaatttcataaaatatgcatgctagcaaaagcacagaaagaccacttaagcaaacttaatataccagacactgcaactgaaacacagtgctctgtgcctatacagtgtacggataaaacagataaacaagaagcgctgtttacgcctcaggctaaagatgatataaatagaggtgcaccatccatcacatctgtcacaccaagaggactgtgcagagatgaggaagacacctctttggaatcactttctaaattcaatgtcaagtttccacctatggacaatgactcaactttcttacatagcactccagagagacccggcatccttagtcctgccacgtctgaggcagtgtgccaagagaaatttaatatggagttcagagacaacccagggaactttgttaaaacagaagaaactttatttgaaattcagggaattgaccccatagcttcagctatacaaaaccttaaaacaactgacaaaacaaagccctcaaatctcgtaaacacttgtatcaggacaactctggatagagctgcgtgtttgccacctggagaccataatgcattatatgtaaatagcttcccacttctggacccatctgatgcaccttttccctcactcgattccccgggaaaagcaatccgaggaccacagcagcccatttggaagccctttcctaatcaagacagtgactcggtggtactaagtggcacagactcagaactgcatatacctcgagtatgtgaattctgtcaagcagttttcccaccatccattacatccaggggggatttccttcggcatcttaattcacacttcaatggagagacttaagacacatttgaaaacagacatatcaagttctatgtgatgattttgggtttttaatactataaatacttgattgtaaactaaattcaagatcatttataggaaaatctagtttcacagctatttgaatttttttctggatttactatataactcttattttttaaaagatcattctgttctttcaaggagaaataagcctaaaagaagaaaaacaaaaaaaattctgtataaaactgtaatcctttgtattcatgtttacagtgctattactataattcaaaattatgtatgtgacttagagttatataatcataatttatgtttatttcaaatatctaagtttattgcttggatttctagtgagagctgttgaatttggtgatgtcaaatgtttctagggttttttagtttgtttttattgagaaaattgattatttatgctataggtgatattctctttgaataaacctataataggaaatagcagaccacataaacatctttgtaaatatcaaacctaatacatttcttgtccagtgataaaacaactggtagaattatttaaacactttagatttttaaataataaacatggctttaatttttactgtgtgtatagctacatgatgaaattaattaaatattaagaggt

SEQ ID NO: 254 - DNA, 1654 bp, Homo sapiens
acgagggtccggctgagccccgggatccgcctccctccgccaggacccgcacagataaactcatcctgaaagtcgctgttgttctcctgctgagcaagaatggaggccccactggtgagtctggatgaagagtttgaggaccttcgaccctcctgctcggaggacccggaggagaagccccagtgtttctatggttcatctccccaccatctcgaggacccctccctctccgagcttgagaatttttcttccgaaataatcagcttcaagtccatggaggacctcgtaaatgaatttgatgagaagctcaatgtctgctttcggaactacaacgccaagaccgagaacctagctcccgtgaagaaccagttacagatccaagaggaggaggagacccttcaggacgaggaggtttgggatgctctgacagacaattacatcccttcactctcagaagactggagggatccaaacatcgaggctctgaatggcaactgctctgacactgagatccatgagaaagaagaggaagagttcaatgagaagagtgaaaatgattccggtatcaacgaggagcctctgctcacagcagatcaggtaattgaggagattgaggaaatgatgcagaactccccagaccctgaggaagaagaggaggttctggaagaagaggatggaggagaaacttcctcccaggcagactcggtcctcctgcaggagatgcaggcattgacacagaccttcaacaacaactggtcctatgaagggctgaggcacatgtctgggtctgagctgaccgagctgctggaccaggtggagggtgccatccgtgacttctcggaggagctggtgcagcagctggcccgccgggacgagctggagtttgagaaggaagtgaagaactcctttatcacggtgcttattgaggttcagaacaagcagaaggagcagcgagaactgatgaaaaagaggcggaaagagaaagggctgagcctgcagagcagccggatagagaagggaaaccagatgcctctcaagcgcttcagcatggaaggcatctccaacattctgcagagtggcatccgccagacctttggctcctcaggaactgacaaacagtatctgaacacagtcattccttacgagaagaaagcctctcctccctcagtggaagacctgcagatgctgacaaacattctctttgccatgaaggaggataatgagaaggtgcctactttgctaacggactacattttaaaagtgctctgccctacctaaccttgccctttggagcagcctcgctgcaggaggtcactgagcaagagtcattccatcacagggactgcatgagaccatgtaacctccgacatgtatttaaacgtgtatagcttaacctggattaaacacgagcaagcgcgcggggtcctttgccgttggcttctagtgctagtaatcattggatgcatgatggggcagggccggtgatggtgcctcccccttgctggtgtcaggagaggggaaggcagccgctttcaccgctcattatgtagtctggctacagccctccaaaacagcttatactcttaagactaattttgaaataaaaccttcatttaattaaaaaaaaaaaaaaaaaaaaaaaaaaaaaattaaa

SEQ ID NO: 255 - DNA, 1575 bp, Homo sapiens
gagagaggaagcttgaagccaatatggagtccgtcagttgctccgctgctgctgtcaggaccggagacatggagtcccagcgggacctgagcctggtgcctgagcggcttcagagacgcgaacaagaacggcagctggaagttgaaaggcggaaacaaaagcggcagaaccaggaggtagagaaggagaacagccactttttcgtcgccacctttgctcgggagcgagcggccgtggaagagcttctggagcgcgcggagtcggtcgagcggctggaggaggcggcctctcggctccaggggctgcagaaactaatcaacgactcagtttttttcctagccgcttacgacctgcggcagggacaagaggcgctggcgcggctgcaggcggccttggccgagcggcgccgggggctgcagcccaagaagcgtttcgctttcaagacccggggaaaggatgctgcttcgtctaccaaagtagacgcggctcctggcatccccccggcagttgaaagcatacaggactccccgctgcccaagaaggcggaaggagacctcggccccagctgggtctgcggtttctccaacctggagtcccaagtcttggagaagagagccagcgagttgcaccagcgcgacgttcttttgaccgaactgagcaactgcacggtcagactgtatggaaatcccaacaccctgcggctaaccaaggcccacagctgcaagctgctctgcggtccggtgtctacctctgttttcctggaggactgcagtgactgcgtgctggcagtggcctgccaacagctccgcatacacagtacgaaagacacccgcatcttcctgcaggtgaccagcagggccatcgtggaggactgcagtgggatccagttcgccccttacacctggagctacccggagatcgacaaggacttcgagagctctggtttagataggagcaaaaataactggaacgatgttgacgattttaactggctggcccgggatatggcctccccaaactggagtattcttcctgaagaggagcgaaatatccagtgggactaagcagttgtcactctgttcttcactcctaccaaatactttccacgttggactttcccccttattgggtctcgaagtttacttattgtcacactgtgtatgttttcagcattttaaggctagagattgtaatgggctcctacttgtaatttccattaaattcgtaacaggtataacactaaagcatttttgctattttcgtcatgcctttgagactgagtcttactccgtcccccagcgtggtggcgcgctgggattacaggcgcgcgccaccacgcgaactcgtatttttagtagagacggggtttcgccatgttgtccgggctgctctcgaactcctgacctcaggtgatccacccgcttcagcttcccaaagtgctggcattacaggcgtgagccaccacgccagggctttatttatttatttttaccacaatagtttgaagcagtaagggggaaggagggtgattatattgctttgtaatggtttgtgatacttgaaacatcacggtgc

SEQ ID NO: 256 - DNA, 1800 bp, Homo sapiens
ggaaggcgcgcctgccgaggcgagctaagcgcccgctcgccatggggagccccgcacatcggcccgcgctgctgctgctgctgccgcctctgctgctgctgctgctgcgcgtcccgcccagccgcagcttcccaggatcgggagactcaccactagaagacgatgaagtcgggtattcacaccctagatataaagataccccgtggtgctcccccatcaaggtgaagtatggggatgtgtactgcagggcccctcaaggaggatactacaaaacagccctgggaaccaggtgcgacattcgctgccagaagggctacgagctgcatggctcttccctactgatctgccagtcaaacaaacgatggtctgacaaggtcatctgcaaacaaaagcgatgtcctacccttgccatgccagcaaatggagggtttaagtgtgtagatggtgcctactttaactcccggtgtgagtattattgttcaccaggatacacgttgaaaggggagcggaccgtcacatgtatggacaacaaggcctggagcggcgccagcctcctgtgtggatatggacctcctagaatcaagtgcccaagtgtgaaggaacgcattgcagaacccaacaaactgacagtccgtgtctgggagacacccgaaggaagagacacagcagatggaattcttactgatgtcattctaaaaggcctccccccaggctccaactttccagaaggagaccacaagatccagtacacagtctatgacagagctgagaataagggcacttgcaaatttcgagttaaagtaagagtcaaacgctgtggcaaactcaatgccccagagaatggttacatgaagtgctccagcgacggtgataattatggagccacctgtgagttctcctgcatcggcggctatgagctccagggtagccctgcccgagtatgtcaatccaacctggcttggtctggcacggagcccacctgtgcagccatgaacgtcaatgtgggtgtcagaacggcagctgcacttctggatcagttttatgagaaaaggagactcctcattgtgtccacacccacagcccgaaacctcctttaccggctccagctaggaatgctgcagcaagcacagtgtggccttgatcttcgacacatcaccgtggtggagctggtgggtgtgttcccgactctcattggcaggataggagcaaagattatgcctccagccctagcgctgcagctcaggctgttgctgcgaatcccactctactccttcagtatggtgctagtggataagcatggcatggacaaagagcgctatgtctccctggtgatgcctgtggccctgttcaacctgattgacacttttcccttgagaaaagaagagatggtcctacaagccgaaatgagccagacctgtaacacctgacatgatggttcctctcttggcaattcctcttcattgtctacatagtgacatgcacacgggaaagccttaaaaatatccttgatgtacagattttatttgtaatttaaaagtctattttattatgagctttcttgcacttaaaaattagcatgctgctttttgtacttggaagtgtttcaaaaaattatatgaccatatttactctttctaactttctttactccatcatggctggttgattttgtagagaaattagaacccataaccatacacaggctatcaacatgttattcaatgtgacacctaactcttttctattttgttttttaagtaagacttttattaataaaacaaaatgttttggaaaaaaaaa

SEQ ID NO: 257 - DNA, 6661 bp, Homo sapiens
gcagcgggcggcagctgcggcgcaaccggctccggagctgcctggcgcggccgggcgggcggcgccgctcaggctcgggctccggctgggcccggcgcggcctcggggctgcccatcgcgcgcggcgggccgggccggtgacgccggacgcccatggacgcctctgaggagccgctgccgccggtgatctacaccatggagaacaagcccatcgtcacctgtgctggagatcagaatttatttacctctgtttatccaacgctctctcagcagcttccaagagaaccaatggaatggagaaggtcctatggccgggctccgaagatgattcacctagagtctaactttgttcaattcaaagaggagctgctgcccaaagaaggaaacaaagctctgctcacgtttcccttcctccatatttactggacagagtgctgtgataccgaagtgtataaagctacagtaaaagatgacctcaccaagtggcagaatgttctgaaggctcatagctctgtggactggttaatagtgatagttgaaaatgatgccaagaaaaaaaacaaaaccaacatccttccccgaacctctattgtggacaaaataagaaatgatttttgtaataaacagagtgacaggtgtgttgtgctctccgaccccttgaaggactcttctcgaactcaggaatcctggaatgccttcctgaccaaactcaggacattgcttcttatgtcttttaccaaaaacctaggcaagtttgaggatgacatgagaaccttgagggagaagaggactgagccaggctggagcttttgtgaatatttcatggttcaggaggagcttgcctttgttttcgagatgctgcagcagttcgaggacgccctggtgcagtacgacgaactggacgccctcttctctcagtatgtggtcaacttcggggccggggatggtgccaactggctgacttttttctgccagccagtgaagagctggaacggattgatcctccgaaaacccatagatatggagaagcgggaatcgatccagaggcgagaagccaccctgttagatctgcgcagttacctgttctctcgccagtgcaccttgctgctcttcctgcagaggccgtgggaggtggcccagcgcgccctagagctgctgcacaactgcgtgcaggaactgaagctcttagaagtctctgtcccacctggtgctctggactgctgggtgtttctgagctgtctggaggtgttgcagaggatagaaggctgctgtgaccgggcacagatcgactcaaacattgcccacactgtggggctatggagctatgccacagaaaagttaaagtccttgggctatctatgtggacttgtgtcagagaaaggacctaactcagaagatctcaacaggacagttgaccttttggcaggtttgggagctgagcgaccagaaacagccaacacagctcagagtccttataagaaactgaaagaagcattatcgtcagtggaagcttttgaaaaacactacttagatttgtcccatgccaccattgaaatgtatacaagcattgggaggattcgatctgctaagtttgttggaaaagatctggcagagttttacatgaggaaaaaggctccacaaaaggcagaaatctatcttcaaggagcactgaaaaactacctggctgagggctgggcactccccatcacacacacaaggaagcagctggccgaatgtcaaaagcaccttggacaaattgaaaactacctgcagaccagcagcctcttagccagtgaccaccacctcactgaagaggagcgcaagcacttctgccaggagatacttgactttgccagccagccgtcagacagcccaggtcataagatagtgctacccatgcattcctttgcacaactgcgagatctccattttgatccctccaatgccgtggtccacgtgggcggcgttttgtgcgttgagataaccatgtacagccagatgcctgtgcctgttcacgtggagcagattgtggtcaatgtccacttcagcattgagaaaaacagctaccggaagactgcggagtggcttaccaagcacaagacgtccaatgggatcattaactttccacccgagaccgcacctttccctgtatcccaaaacagtttgcccgcgctggagttgtatgaaatgtttgagagaagcccatctgataactccttgaacacgactgggattatctgcagaaacgtccacatgctcctgagaaggcaggagagcagctcctctctagagatgccctcaggggtggctctggaggagggtgcccacgtgctgaggtgcagccacgtgaccctggaaccaggggccaaccagataacattcaggactcaggccaaggaacctggaacgtatacactcaggcagctgtgcgcctcggtgggctccgtgtggttcgtcctccctcacatctaccccattgtgcagtacgacgtgtactcacaggagccccagctgcacgtggagccgctggctgatagccttctggcaggcattcctcagagagtcaagttcactgtcactaccggccattatacgataaagaatggagacagcctgcagcttagcaatgccgaagccatgctcatcctgtgccaggcggagagcagggccgtggtctactccaacacgagagaacagtcttctgaggccgcgctccggattcagtcctccgacaaggtcacgagcatcagtctgcctgttgcgcctgcgtaccacgtgatcgaatttgaactggaagttctctctttaccttcagccccagcactcggaggggagagtgacatgctggggatggcagagccccacaggaagcataaggaccaacagagaactggccgctgcatggttaccacagaccacaaagtgtcgattgactgcccgtggtccatctactccacagtcatcgcactgaccttcagcgtacccttcaggaccacacacagcctcctgtcctcaggaacacggaaatatgttcaagtttgtgtccagaatttgtcagaacttgactttcagctgtcagatagttatcttgtagataccggtgatagtaccgacctgcaactagtaccactgaacacgcagtcccagcagcccatctacagcaagcagtcggtgttcttcgtctgggaactcaagtggacagaagagcctcccccttctctgcattgccggttctctgttggattttccccagcttctgaggaacagctgtctatctccttaaagccgtatacttatgaatttaaagtggaaaatttttttacattatacaacgtgaaggctgagatctttcccccttcgggaatggagtattgcagaacaggctccctctgctccctggaggttttgatcacgaggctctcagacctcttggaggtggataaagatgaagcactgactgaatctgatgagcatttttcgacaaagcttatgtatgaagttgtcgacaacagtagcaactgggcagtgtgtgggaaaagctgcggtgtcatctccatgccagtggctgctcgggccactcacagggtccacatggaagtgatgccgctcttcgccgggtatctccccctgcccgacgtcaggctgttcaagtacctcccccatcattctgcacactcctcccaactggacgctgacagctggatagaaaacgacagcctgtcagtagacaagcacggggacgaccagccggacagcagcagcctcaagagcaggggcagcgtgcattcggcctgcagcagcgagcacaaaggcctacccatgccccggctgcaggcactgccggccggccaggtcttcaactccagctcgggcacacaagtcctggtcatccccagccaagatgaccacgtcctggaagtcagtgtaacatgacaacgccagggtgaacacacgccacttcccagctaggagtgcactttatgggactgtgactggactcttccgttctggctccagccagaccttcagtggtcctgcctggccgtggggacatcagagagtgtcatcacgcagctggccagctgagttctgttgttgttttcatgccgcctgtgatctcagattcctgcttttctcaccccgtccccatgctggtgtccgacgccgcttactcagagccctggcctccctccccctacctcacacgctgctcatgaaagtttccacccacgctgtctccacggaacagcctccgtctgctggctcttcgtggaaggccatttgtctttcaggtagacactcagcagccctcacggtcttagtgacgtgtgtgcctttctggtcacacagctgcccagtttcctgatcggggtggatttgtgtcccctaaggggtaaaacagccgtttaccgcagatcctctcattgtgcttttctagaataacacccttctaggggaggcgggtgggggagggagggatcataaccccttctgtgccttgggatgccggagctgggggacctggaggcccatcagccggagccacgtgaaaggtactgaagaaagctgagacccggctgtgaggagcgcctcagcggtgaggtggtttagggataaatgtttctggaaccctgtggtcccccataatgttgatagaatatcatatgcactgggagttaaatatatttaatttaatgatcattatatatgtgggggttaatatgttgtttttctgtccctttaaagtctttacatgtaattgtagctgtataatcgttatttttcttttgcatcttaagtcttagaaattaagatattccatcgtgaggatgagagaggtcctcagtgtgtttttggtctggttgtagggaaggactcaagtcctggaatgtcctccactggtctactgagttgcagtcacactgttccaatggattatttgctttcggttgtaaatttaattgtacatatggttgatttattatttttaaaaatacagactaactgatgtaatgtttatgtataagttgcaccaaaaatcaaggacaaaaataagtgtgtttgtttttacaggtgtgaaagtcacagcttgtaaataagtgttgtatgtattaaaccttttccagttctccaaagcgatgtatttttgtacacttgaaatagagtactcttaatttactgggcaaatgtgcttggaattgaacttgacaagattagctcaagcagatagagtcgggtccagcagtgggtggccctcgtgtgaatccccgtggatgtgcaagttgtggagagaaggagcaccgggttcctgcccagcactgtgcttgcgggaggcggtggggcatgggaggaaggaggcacagaccggggaaatatgacagccgtcatttccagtattctctgtgttgtcttttagctcattcaataaataaaggtggtgtgatttttttttcctcctgtctttttcatttgtagaaactggagacgtgtaaagaagataaataattgtgtaattaaactttccagaaatttatcttcctcatgtgcagtttaacaaacttggtcaaactagttagcaaattagaacttcagaatctaatgatagtttagggtttctaaaataaggttttttattgtaaaaattgacgattgccctgcatttctaccaagtcctgtgaataaagagatgggagatttgattccgtcagaagagactgtaatccgtgtcgtcagcctgggagccttccccagtgtaatgtagctttctctcttaccttctggaagagggaatgtttcatttattactgtttgattttcttgtatctggttctactcccaggatgaaattatccaactacatatatatttagaggaagaaagtgaaggggaaatttaaaatgtttacggcgcttaattgcctggaaatgaaatgaaatcaaatttatcagtttttttccccctaattacccaaaagatcttttggcaaactatgttacatgaatgcttctgcctctttaagacaaagaagaatgtcacccaaaattgtcatttttttcttaatgttcatcataaaagtcctaaaagagtaactgtaattggatgtttattgtttttatctaaagtaaggtgtatgtgtttgagacaagcaggttttgttgataaagagatgttaaataattgtgaagccagatatgcaatgtgtatctaaaaagcaaggaatttgcagccgttttacaaatatctgtggaacatgtaaatactgtcaaatggaaaataaaataagttataattttttgtgaatttcatgggatgtcctatgattgggaaaaattataactcttctgattctaatgtggaaattgttgtatttaatctgaaaatgactttacctacaacagttccattgtcagcacagcctaggagggtcagattcctgtattaattactcttagtggagatgccagatatcccatacagaattagcagagaaaatacacacaggcttctattcaaattttctttagtgcttaaaattaagttttaaaatgaaatcagacactgcaggtttgtatataaaatgaaaagctatactactttttataaaagggcaaactgggctgatgtaaatgttttactttcaactgtgttctttaaaataaat

SEQ ID NO: 258 - DNA, 901 bp, Homo sapiens
ctcttcccgcagccaagggtgggcgccggtcctaggaggcgacggttgtaagccagacaaaaagaactggggtgcccggagtgccaggtggcgggcaagcggtgggcttttcggcggggtctttaggatttgcagctccaggaagcgagatgtcgaagccgccacccaaaccagtcaaaccagggcaagttaaagtcttcagagccctgtatacgtttgaacccagaactccagatgaattatactttgaggaaggtgatattatctacattactgacatgagcgataccaattggtggaaaggcacctccaaaggcaggactggactaattccaagcaactatgtggctgagcaggcagaatccattgacaatccattgcatgaagcagcaaaaagaggcaacttgagctggttgagagagtgtttggacaacagagtgggtgttaatggcttagacaaagctggaagcactgccttatactgggcttgccacgggggccacaaagatatagtggaaatgctatttactcaaccaaatattgaactgaaccagcagaacaagttgggagatacagctttcgatgctgctgcctggaagggttatgcagatatcgtccagttgcttctggcaaaaggtgctagaacagacttaagaaacattgagaagaagctggccttcgacatggctaccaatgctgcctgtgcatctctcctgaaaaagaaacagggaacagatgcagttcgaacattaagcaatgccgaggactatctcgatgatgaagactcagattaattcctttctggagctttgagatctaaaacttctgttgcttttgccattccaaaactttgtctttgccagaaaagtgttggtaactataaagaaaatatatatgaaaa

SEQ ID NO: 259 - DNA, 953 bp, Homo sapiens
cgtggtcgacggcccgggctggtctgtgccttgactacgtaacatcttgtcctcacagcccagagcatgttccagatcccagagtttgagccgagtgagcaggaagactccagctctgcagagaggggcctgggccccagccccgcaggggacgggccctcaggctccggcaagcatcatcgccaggccccaggcctcctgtgggacgccagtcaccagcaggagcagccaaccagcagcagccatcatggaggccgctggggctgtggagatccggagtcgccacagctcctaccccgcggggacggaggacgacgaagggatgggggaggagcccagccctttcggggccgctcgcgctcggcgccccccaacctctgggcagcacagcgctatggccgcgagctccggaggatgagtgacgagtttgtggactcctttaagaagggacttcctcgcccgaagagcgcgggcacagcaacgcagatgcggcaaagctccagctggacgcgagtcttccagtcctggtgggatcggaacttgggcaggggaagctccgccccctcccagtgaccttcgctccacatcccgaaactccacccgttcccactgccctgggcagccatcttgaatatgggcggaagtacttccctcaggcctatgcaaaaagaggatccgtgctgtctcctttggagggagggctgacccagattcccttccggtgcgtgtgaagccacggaaggcttggtcccatcggaagttttgggttttccgcccacagccgccggaagtggctccgtggccccgccctcaggctccgggctttcccccaggcgcctgcgctaagtcgcgagccaggtttaaccgttgcgtcaccgggacccgagcccccgcgatgccctgggggcccgtgctcactaccaaatgttaataaagcccgcgtctgtgccgcc

SEQ ID NO: 260 - DNA, 13449 bp, Homo sapiens
  misc_feature (1)...(13449): n=a,t,g or c
gcggccgcgtcgacgcggcggcggcagcggcgtcggctcggggttctccgggagagggggagtgcgcggcggccgcagctgccacaaaccaggtgaagctttgttctaagaatatttgtttcatctagtttatgagtccaaatgatatagactgtaaatgtcacagcagtggtgaaagactgctcggtcatgagcaccgacagtaactcactggcacgtgaatttctgaccgatgtcaaccggctttgcaatgcagtggtccagagggtggaggccagggaggaagaagaggaggagacgcacatggcaacccttggacagtaccttgtccatggtcgaggatttctattacttaccaagctaaattctataattgatcaggcattgacatgtagagaagaactcctgactcttcttctgtctctccttccactggtatggaagatacctgtccaagaagaaaaggcaacagattttaacctaccgctctcagcagatataatcctgaccaaagaaaagaactcaagttcacaaagatccactcaggaaaaattacatttagaaggaagtgccctgtctagtcaggtttctgcaaaagtaaatgtttttcgaaaaagcagacgacagcgtaaaattacccatcgctattctgtaagagatgcaagaaagacacagctctccacctcagattcagaagccaattcagatgaaaaaggcatagcaatgaataagcatagaaggccccatctgctgcatcattttttaacatcgtttcctaaacaagaccaccccaaagctaaacttgaccgcttagcaaccaaagaacagactcctccagatgctatggctttggaaaattccagagagattattccaagacaggggtcaaacactgacattttaagtgagccagctgccttgtctgttatcagtaacatgaacaattctccatttgacttatgtcatgttttgttatctttattagaaaaagtttgtaagtttgacgttaccttgaatcataattctcctttagcagccagtgtagtgcccacactaactgaattcctagcaggctttggggactgctgcagtctgagcgacaacttggagagtcgagtagtttctgcaggttggaccgaagaaccggtggctttgattcaaaggatgctctttcgaacagtgttgcatcttctgtcagtagatgttagtactgcagagatgatgccagaaaatcttaggaaaaatttaactgaattgcttagagcagctttaaaaattagaatatgcctagaaaagcagcctgacccttttgcaccaagacaaaagaaaacactgcaggaggttcaggaagattttgtgttttcaaagtatcgtcatagagcccttcttttacctgagcttttggaaggagttcttcagattctgatctgttgtcttcaaagtgcagcttcaaatcccttctacttcagtcaagccatggatttggttcaagaattcattcagcatcatggatttaatttatttgaaacagcagttcttcaaatggaatggctggttttaagagatggagttcctcccgaggcctcagagcatttgaaagccctaataaatagtgtgatgaaaataatgagcactgtcaaaaaagtgaaatcagagcaacttcatcattcgatgtgtacaagaaaaaggcacagacgatgtgaatattctcattttatgcatcatcaccgagatctctcaggtcttctggtttcggcttttaaaaaccaggtttccaaaaacccatttgaagagactgcagatggagatgtttattatcctgagcggtgctgttgcattgcagtgtgtgcccatcagtgcttgcgcttactacagcaggcttccttgagcagcacttgtgtccagatcctatcgggtgttcataacattggaatatgctgttgtatggatcccaaatctgtaatcattcctttgctccatgcttttaaattgccagcactgaaaaattttcagcagcatatattgaatatccttaacaaacttattttggatcagttaggaggagcagagatatcaccaaaaattaaaaaagcagcttgtaatatttgtactgttgactctgaccaactagcccaattagaagagacactgcagggaaacttatgtgatgctgaactctcctcaagtttatccagtccttcttacagatttcaagggatcctgcccagcagtggatctgaagatttgttgtggaaatgggatgctttaaaggcttatcagaactttgtttttgaagaagacagattacatagtatacagattgcaaatcacatttgcaatttaatccagaaaggcaatatagttgttcagtggaaattatataattacatatttaatcctgtgctccaaagaggagttgaattagcacatcattgtcaacacctaagcgttacttcagctcaaagtcatgtatgtagccatcataaccagtgcttgcctcaggacgtgcttcagatttatgtaaaaactctgcctatcctgcttaaatccagggtaataagagatttgtttttgagttgtaatggagtaagtcaaataatcgaattaaattgcttaaatggtattcgaagtcattctctaaaagcatttgaaactctgataatcagcctaggggagcaacagaaagatgcctcagttccagatattgatgggatagacattgaacagaaggagttgtcctctgtacatgtgggtacttcttttcatcatcagcaagcttattcagattctcctcagagtctcagcaaattttatgctggcctcaaagaagcttatccaaagagacggaagactgttaaccaagatgttcatatcaacacaataaacctattcctctgtgtggcttttttatgcgtaagtaaagaagcagagtctgacagggagtcggccaatgactcagaagatacttctggctatgacagcacagccagcgagcctttaagtcatatgctgccatgtatatctctcgagagccttgtcttgccttctcctgaacatatgcaccaagcagcagacatttggtctatgtgtcgttggatctacatgttgagttcagtgttccagaaacagttttataggcttggtggtttccgagtatgccataagttaatatttatgataatacagaaactgttcagaagtcacaaagaggagcaaggaaaaaaggagggagatacaagtgtaaatgaaaaccaggatttaaacagaatttctcaacctaagagaactatgaaggaagatttattatctttggctataaaaagtgaccccataccatcagaactaggtagtctaaaaaagagtgctgacagtttaggtaaattagagttacagcatatttcttccataaatgtggaagaagtttcagctactgaagccgctcccgaggaagcaaagctatttacaagtcaagaaagtgagacctcacttcaaagtatacgacttttggaagcccttctggccatttgtcttcatggtgccagaactagtcaacagaagatggaattggagttacctaatcagaacttgtctgtggaaagtatattatttgaaatgagggaccatctttcccagtcaaaggtgattgaaacacaactagcaaagccgttatttgatgccctgcttcgagttgccctcgggaattattcagcagattttgaacataatgatgctatgactgagaagagtcatcaatctgcagaagaattgtcatcccagcctggtgatttttcagaagaagctgaggattctcagtgttgtagttttaaacttttagttgaagaagaaggttacgaagcagatagtgaaagcaatcctgaagatggcgaaacccaggatgatggggtagacttaaagtctgaaacagaaggtttcagtgcatcaagcagtccaaatgacttactcgaaaacctcactcaaggggaaataatttatcctgagatttgtatgctggaattaaatttgctttctgctagtaaagccaaacttgatgtgcttgcccatgtatttgagagttttttgaaaattattaggcagaaagaaaagaatgtttttctgctcatgcaacagggaactgtgaaaaatcttttaggagggttcttgagtattttaacacaggatgattctgattttcaagcatgccagagagtattggtggatcttttggtatctttgatgagttcaagaacatgttcagaagagctaacccttcttttgagaatatttctggagaaatctccttgtacaaaaattcttcttctgggtattctgaaaattattgaaagtgatactactatgagcccttcacagtatctaaccttccctttactgcacgctccaaatttaagcaacggtgtttcatcacaaaagtatcctgggattttaaacagtaaggccatgggtttattgagaagagcacgagtttcacggagcaagaaagaggctgatagagagagttttccccatcggctgctttcatcttggcacatagccccagtccacctgccgttgctggggcaaaactgctggccacacctatcagaaggtttcagtgtttccctgtggtttaatgtggagtgtatccatgaagctgagagtactacagaaaaaggaaagaagataaagaaaagaaacaaatcattaattttaccagatagcagttttgatggtacagagagcgacagaccagaaggtgcagagtacataaatcctggtgaaagactcatagaagaaggatgtattcatataatttcactgggatccaaagcgttgatgatccaagtgtgggctgatccccacaatgccactcttatctttcgtgtgtgcatggattcaaatgatgacatgaaagctgttttactagcacaggttgaatcacaggagaatattttcctcccaagcaaatggcaacatttagtactcacctacttacagcagccccaagggaaaaggaggattcatgggaaaatctccatatgggtctctggacagaggaagcctgatgttactttggattttatgcttccaagaaaaacaagtttgtcatctgatagcaataaaacattttgcatgattggccattgtttatcatcccaagaagagtttttgcagttggctggaaaatgggacctgggaaatttgcttctcttcaacggagctaaggttggttcacaagaggccttttatctgtatgcttgtggacccaaccatacatctgtaatgccatgtaagtatggcaagccagtcaatgactactccaaatatattaataaagaaattttgcgatgtgaacaaatcagagaactttttatgaccaagaaagatgtggatattggtctcttaattgaaagtctttcagttgtttatacaacttactgtcctgctcagtataccatctatgaaccagtgattagacttaaaggtcaaatgaaaacccaactctctcaaagacccttcagctcaaaagaagttcagagcatcttattagaacctcatcatctaaagaatctccaacctactgaatataaaactattcaaggcattctgcacgaaattggtggaactggcatatttgtttttctctttgccagggttgttgaactcagtagctgtgaagaaactcaagcattagcactgcgagttatactctcattaattaaatacaaccaacaaagagtacatgaattagaaaattgtaatggactttctatgattcatcaggtgttgatcaaacaaaaatgcattgttgggttttacattttgaagacccttcttgaaggatgctgtggtgaagatattatttatatgaatgagaatggagagtttaagttggatgtagactctaatgctataatccaagatgttaagctgttagaggaactattgcttgactggaagatatggagtaaagcagagcaaggtgtttgggaaactttgctagcagctctagaagtcctcatcagagcagatcaccaccagcagatgtttaatattaagcagttattgaaagctcaagtggttcatcactttctactgacttgtcaggttttgcaggaatacaaagaggggcaactcacacccatgccccgagaggtttgtagatcatttgtgaaaattatagcagaagtccttggatctcctccagatttggaattattgacaattatcttcaatttccttttagcagttcaccctcctactaatacttacgtttgtcacaatcccacgaacttctacttttctttgcacatagatggcaagatctttcaggagaaagtgcggtcaatcatgtacctgaggcattccagcagtggaggaaggtcccttatgagccctggatttatggtaataagcccatctggttttactgcttcaccatatgaaggagagaattcctctaatattattccacaacagatggccgcccatatgctgcgttctagaagcctaccagcattccctacttcttcactactaacgcaatcacaaaaactgactggaagtttgggttgtagtatcgacaggttacaaaatattgcagatacttatgttgccacccaatcaaagaaacaaaattctttggggagttccgacacactgaaaaaaggcaaagaggacgcattcatcagtagctgtgagtctgcaaaaactgtttgtgaaatggaagctgtcctctcagcccaggtctctgtcagtgatgtcccaaagggagtgctgggatttccagtggtcaaagcagatcataaacagttgggagcagaacccaggtcagaagatgacagtcctggggatgagtcctgcccacgccgacctgattacctaaagggattggcctccttccagcgaagccacagcactattgcaagccttgggctagcttttccttcacagaacggatctgcagctgttggccgttggccaagtcttgttgatagaaacactgatgattgggaaaactttgcctattctcttggttatgagccaaattacaaccgaactgcaagtgctcacagtgtaactgaagactgtttggtacctatatgctgtggattatatgaactcctaagtggggttcttcttatcctgcctgatgttttgcttgaagatgtgatggacaagcttattcaagcagatacacttttggtcctcgttaaccacccatcaccagctatacaacaaggtgttattaaactattagatgcatattttgctagagcatctaaggaacaaaaagataaatttctgaagaatcgtggattttccttgctagccaaccagttgtatcttcatcgaggaactcaagaattgttagaatgcttcatcgaaatgttctttggtcgacatattggccttgatgaagaatttgatctggaagatgtgagaaacatgggattgtttcagaagtggtctgtcattcctattctgggactaatagagacctctctatatgacaacatactcttgcataatgctcttttacttcttctccaaattttaaattcttgttctaaggtagcagatatgttgctggataatggtctactctatgtgttatgtaatacagtagcagccctgaatggattagaaaagaacattcccatgagtgaatataaattgcttgcttgtgatatacagcaacttttcatagcagttacaattcatgcttgcagttcctcaggctcacaatattttagggttattgaagaccttattgtaatgcttggatatcttcaaaatagcaaaaacaagaggacacaaaatatggctgttgcactacagcttagagttctccaggctgctatggaatttataaggaccaccgcaaatcatgactctgaaaacctcacagattcactccagtcaccttctgctccccatcatgcagtagttcaaaagcggaaaagcattgctggtcctcgaaaatttccccttgctcaaactgaatcgcttctgatgaaaatgcgttcagtggcaaatgatgagcttcatgtgatgatgcaacggagaatgagccaagagaaccctagccaagcaactgaaacggaacttgcgcagagactacagaggctcactgttttagcagtcaacaggattatttatcaagaatttaattcagacattattgacattttgagaactccagaaaatgtaactcaaagcaagacctcagttttccagaccgaaatttctgaggaaaatattcatcatgaacagtcttctgttttcaatccatttcagaaagaaatttttacatatctggtagaaggattcaaagtatctattggttcaagtaaagccagtggttccaagcagcaatggactaaaattctgtggtcttgtaaggagaccttccgaatgcagcttgggagactactagtgcatattttgtcgccagcccacgctgcacaagagagaaagcaaatttttgaaatagttcatgaaccaaatcatcaggaaatactacgagactgtctcagcccatccctacaacatggagccaagttagttttgtatttgtcagagttgatacataatcaccaaggtgaattgactgaagaagagctaggcacagcagaactgcttatgaatgctttgaagttatgtggtcacaagtgcatccctcccagtgcatcaacaaaagcagaccttattaaaatgatcaaagaggaacaaaagaaatatgaaactgaagaaggagtgaataaagctgcttggcagaaaacagttaacaataatcaacaaagtctctttcagcgtctggattcaaaatcaaaggatatatctaaaatagctgcagatatcacccaggcagtgtctctctcccaaggaaatgagagaaaaaaggtgatccagcatattagaggaatgtataaagtagatttgagtgccagcagacattggcaggaacttattcagcagctgacacatgatagagcagtatggtatgaccccatctactatccaacctcatggcagttggatccaacagaagggccaaatcgagagaggagacgtttacagagatgttatttaactattccaaataagtatctccttagggatagacagaaatcagaagatgttgtcaaaccaccactctcttacctgtttgaagacaaaactcattcttctttctcttctactgtcaaagacaaagctgcaagtgaatctataagagtgaatcgaagatgcatcagtgttgcaccatctagagagacagctggtgaattgttactaggtaaatgtggaatgtattttgtggaagataatgcttctgatacagttgaaagttcgagccttcagggagagttggaaccagcatcattttcctggacatatgaagaaattaaagaagttcacaagcgttggtggcaattgagagataatgctgtagaaatctttctaacaaatggcagaacactcctgttggcatttgataacaccaaggttcgtgatgatgtataccacaatatactcacaaataacctccctaatcttctggaatatggtaacatcaccgctctgacaaatttatggtatactgggcaaattactaattttgaatatttgactcacttaaacaaacatgctggccgatccttcaatgatctcatgcagtatcctgtgttcccatttatacttgctgactacgttagtgagacacttgacctcaatgatctgttgatatacagaaatctctctaaacctatagctgttcagtataaagaaaaagaagatcgttatgtggacacatacaagtacttggaggaagagtaccgcaaaggagccagagaagatgaccccatgcctcccgtgcagccctatcactatggctcccactattccaatagcggcactgtgcttcacttcctggtcaggatgcctcctttcactaaaatgtttttagcctatcaagatcaaagttttgacattccagacagaacttttcattctacaaatacaacttggcgactctcatcttttgaatctatgactgatgtgaaagaacttatcccagagtttttctatcttccagagttcctagttaaccgtgaaggttttgattttggtgtgcgtcagaatggtgaacgggttaatcacgtcaaccttcccccttgggcgcgtaatgatcctcgtctttttatcctcatccatcggcaggctctagagtctgactacgtgtcgcagaacatctgtcagtggattgacttggtgtttgggtataagcaaaaggggaaggcttctgttcaagcgatcaatgtttttcatcctgctacatattttggaatggatgtctctgcagttgaagatccagttcagagacgagcgctagaaaccatgataaaaacctacgggcagactccccgtcagctgttccacatggcccatgtgagcagacctggagccaagctcaatattgaaggagagcttccagctgctgtggggttgctagtgcagtttgctttcagggagacccgagaacaggtcaaagaaatcacctatccgagtcctttgtcatggataaaaggcttgaaatggggggaatacgtgggttcccccagtgctccagtacctgtggtctgcttcagccagccccacggagaaagatttggctctctccaggctctgcccaccagagcaatctgtggtttgtcacggaatttctgtcttgtgatgacatatagcaaggaacaaggtgtgagaagcatgaacagtacggacattcagtggtcagccatcctgagctggggatatgctgataatattttaaggttgaagagtaaacaaagtgagcctccagtaaactttattcaaagttcacaacagtaccaggtgactagttgtgcttgggtgcctgacagttgccagctgtttactggaagcaaatgcggtgtcatcacagcctacacaaacagatttacaagcagcacgccatcagaaatagaaatggagactcaaatacatctctatggtcacacagaagagataaccagcttatttgtttgcaaaccatacagtatactgataagtgtgagcagagacggaacctgcatcatatgggatttaaacaggttatgctatgtacaaagtctggcgggacacaaaagccctgtcacagctgtctctgccagtgaaacctcaggtgatattgctactgtgtgtgattcagctggcggaggcagtgacctcagactctggacggtgaacggggatctcgttggacatgtccactgcagggagatcatctgttccgtggctttctccaaccagcctgagggagtatctatcaatgtaatcgctgggggattagaaaatggaattgtaaggttatggagcacatgggacttaaagcctgtgagagaaattacatttcccaaatcaaataagcccatcatcagccttacattttcttgtgatggccaccatttgtacacagcaaacagtgatgggaccgtgattgcctggtgtcggaaggaccagcagcgcttgaaacagccaatgttctattccttccttagcagctatgcagccgggtgaatgcgaatgaacttcacgttctccaaagcactttaactccaaactagatttgttgacttcaccagttttaggaggttgaacctaaagaaatggatgactggacaaaccatccaaataatgataaagtctattcatctgcacaaaattctgaagagtcacatgatcctaagaggaaagttctgttctattttagtgataatctggaagattgtgtcaatatgcactagccaacaagttttaagcctcgcatggtacattaaaatgatattcttaaaattttttcccaccaaggtattccaaagaaaatattaaggtctcccctttttctatgattccaaaaggaccagtagaatttaaattggttggttgatngtttatataaaacacactaaaattatattttaaaagtttantgccntgaaatactcctcccaccacacacacatgctccaaaagaggaaagaaaaaaagataatttttaggacttgataattgctttctttgagaagcaaattattcagtaggtgcctctgtaccaaatattttatggaatatctaaatactaaaataaactatgaatgaatctcaaaattaggcagtttttgccagttgctttcttagctcaaaggagaaccagaatttttttgacagccacaaacaagaatacaggtatcttggatttcagacacattctgtttcttcataaaaattttacttaaaatctgtaacgctagatattgactatccttagttgagtcactgaggtttaaacacaatggtaagtcttaaagtctgctatttacagagcattgaatctgtaccaatttgcaatagaaagccttcagtatgcaagaagtttgcatgggtattaagaacacagcctaaataaggcatttgatctaatctgcaggaagaattttcttccccaaaacagaattataaaagcttactttaaacaggaggcagaataattcttttaggaaaccatttcattctgtttctactaacctataccatctgagaattcctaaacatcttggagccgtctgtctctcccatatgatggctgtctgtatatttttacttggggtgctgctttattggctttgaaaacactgtcagataagctcagtaatatgttaccatgggataaaaatatgtatccctgcctaagaataacttgtgcatttgttatggaaatttaattcatatggtgtttacagtactacttttgtaacttccagactttctaaaacattctgcttaaaaaccatataaaatataattccaaagtctctgctgtcaagatagattcgagagaaagcacgtggccatgtatgctttaaccttaaactgcatacacatgtagtgatacctaggctgcatttagatcaccgtgtgctcaggccaggtgtgaatcctgaggtccatggaggtgcagagatgagattactcctattcacgttgaagtgatttgctttgttaacaaaaaattgcagctattgtctagctttcatttttttactgagaactttaaattagtcccctattagaatagggttgctactcatctttttttaaaaaccgaatttcatcatttatctaaagagaaaatatgcagaataactggtcttgttaagagtgcaatattatatttttatgtaaaaataaaaattaatttggggggattatttattcagcatgaaacctaatatgtatatgtttgaaatacttcataatgtgcatgttgtagcaaacatttctgtaaattatcacaagctctgttacctttatatacgctgcctcttcaatttggaaataaatttcataaaaaaaaaaaaaaaaaaaaaaaaa

SEQ ID NO: 261 - DNA, 1716 bp, Homo sapiens
gccaactccgtggtggtctgggtgaatatccaggccaagaccacaggctatgacacgcactgctacatcttgaacctggccattgccgacctgtgggttgtcctcaccatcccagtctgggtggtcagtctcgtgcagcacaaccagtggcccatgggcgagctcacgtgcaaagtcacacacctcatcttctccatcaacctcttcagcagcattttcttcctcacgtgcatgagcgtggaccgctacctctccatcacctacttcaccaacacccccagcagcaggaagaagatggtacgccgtgtcgtctgcatcctggtgtggctgctggccttctgcgtgtctctgcctgacacctactacctgaagaccgtcacgtctgcgtccaacaatgagacctactgccggtccttctaccccgagcacagcatcaaggagtggctgatcggcatggagctggtctccgttgtcttgggctttgccgttcccttctccattatcgctgtcttctacttcctgctggccagagccatctcggcgtccagtgaccaggagaagcacagcagccggaagatcatcttctcctacgtggtggtcttccttgtctgctggttgccctaccacgtggcggtgctgctggacatcttctccatcctgcactacatccctttcacctgccggctggagcacgccctcttcacggccctgcatgtcacacagtgcctgtcgctggtgcactgctgcgtcaaccctgtcctctacagcttcatcaatcgcaactacaggtacgagctgatgaaggccttcatcttcaagtactcggccaaaacagggctcaccaagctcatcgatgcctccagagtctcagagacggagtactctgccttggagcagagcaccaaatgatctgccctggagaggctctgggacgggtttacttgtttttgaacagggtgatgggccctatggttttctagagcaaagcaaagtagcttcgggtcttgatgcttgagtagagtgaagaggggagcacgtgccccctgcatccattytctctttctcttgatgacgcagctgtcatttggctgtgcgtgctgacagttttgcaacaggcagagctgtgtcgcacagcagtgctgtgcgtcagagccagctgaggacaggcttgcctggacttctgtaagataggattttctgtgtttcctgaattttttatatggtgatttgtatttaaattttaagactttattttctcactattggtgtaccttataaatgtatttgaaagttaaatatattttaaatattgtttgggaggcatagtgctgacatatattcagagtgttgtagttttaaggttagcgtgactttcagttttgactaaggatgacactaattgttagctgttttgaaattatatatatataaatatataaatatatgccagtcttggctgaaatgttttatttaccatagttttatatctgtgtggtgttttgtaccggcacgggatatggaacgaaaactgctttgtaatgcagtttgtgacattaatagtattgtaaagttacattttaaaataaacaaaaaactgttctggactgcaaatctgcacacacaacgaacagttgcatttcagagagttctctcaatttgtaagttatttttttttaataaagatttttgtttcctaaaaaaaaaaaaaaaaaaaaa

SEQ ID NO: 262 - DNA, 2041 bp, Homo sapiens
aggttcgatacaagaggctgttttcctagcgtggcttgctgcctttggtaagaacatgtcgtccatcttgccattcacgccgccagttgtgaagagactgctgggatggaagaagtcagctggtgggtctggaggagcaggcggaggagagcagaatgggcaggaagaaaagtggtgtgagaaagcagtgaaaagtctggtgaagaagctaaagaaaacaggacgattagatgagcttgagaaagccatcaccactcaaaactgtaatactaaatgtgttaccataccaagcacttgctctgaaatttggggactgagtacaccaaatacgatagatcagtgggatacaacaggcctttacagcttctctgaacaaaccaggtctcttgatggtcgtctccaggtatcccatcgaaaaggattgccacatgttatatattgccgattatggcgctggcctgatcttcacagtcatcatgaactcaaggcaattgaaaactgcgaatatgcttttaatcttaaaaaggatgaagtatgtgtaaacccttaccactatcagagagttgagacaccagttttgcctccagtattagtgccccgacacaccgagatcctaacagaacttccgcctctggatgactatactcactccattccagaaaacactaacttcccagcaggaattgagccacagagtaattatattccagaaacgccacctcctggatatatcagtgaagatggagaaacaagtgaccaacagttgaatcaaagtatggacacaggctctccagcagaactatctcctactactctttcccctgttaatcatagcttggatttacagccagttacttactcagaacctgcattttggtgttcaatagcatattatgaattaaatcagagggttggagaaaccttccatgcatcacagccctcactcactgtagatggctttacagacccatcaaattcagagaggttctgcttaggtttactctccaatgttaaccgaaatgccacggtagaaatgacaagaaggcatataggaagaggagtgcgcttatactacataggtggggaagtttttgctgagtgcctaagtgatagtgcaatctttgtgcagagccccaattgtaatcagagatatggctggcaccctgcaacagtgtgtaaaattccaccaggctgtaatctgaagatcttcaacaaccaggaatttgctgctcttctggctcagtctgttaatcagggttttgaagccgtctatcagctaactagaatgtgcaccataagaatgagttttgtgaaagggtggggagcagaataccgaaggcagacggtaacaagtactccttgctggattgaacttcatctgaatggacctctacagtggttggacaaagtattaactcagatgggatccccttcagtgcgttgctcaagcatgtcataaagcttcaccaatcaagtcccatggaaaagacttaatgtaacaactcttctgttcattagcattgtgttgtggtccctatggctgtttactatccaaaagttcaagagagaaaacagcacttgaggtctcatcaattaaagcaccttgtggaatctgtttcctatatttgaatattagatgggaaaattagtgtctagaaatactctcccattaaagaggaagagaagattttaaagacttaatgatgtcttattgggcataaaactgagtgtcccaaaggtttattaataacagtagtagttatgtgtacaggtaatgtatcatgatccagtatcacagtattgtgctgtttatatacatttttagtttgcatagatgaggtgtgtgtgtgcgctgcttcttgatctaggcaaacctttataaagttgcagtacctaatctgttattcccacttctctgttatttttgtgtgtcttttttaatatataatatatatcaagattttcaaattatttagaagcagattttcctgtagaaaaactaatttttctgccttttaccaaaaataaactcttggggaag

SEQ ID NO: 263 - DNA, 886 bp, Homo sapiens
  misc_feature (1)...(886): n=a,t,g or c
gactggaagtcatcgcatactaggaccttgcacttgcttactctgaacctctcagaaaaaggggtaagtgncagtttgctctttgatacgtcagatgatgaagagctgagagaacagctggatatgcactcaatcatcgtctcctgtgttaatgatgaacccctcttcacggcagaccaggttattgaagaaattgaagaaatgatgcaggaatcaccggacccagaagatgatgaaacccctacacagtcagatcggctttcaatgctttcccaggaaattcaaactctcaagaggtctagtaccggcagttatgaagagagagtgaaaaggctctcagtgtctgagttaaatgaaatcctggaagaaattgagactgccattaaggagtactctgaggagctggtgcagcagttggctttacgagatgaactggagtttgaaaaggaagtgaaaaacagctttatttctgttcttattgaagtgcaaaacaaacagaaagagcacaaagaaacagcaaaaaagaaaaagaaactaaaaaatggcagctctcagaatgggaagaatgagagaagtcatatgcccggcacatatttgactacagtcattccttatgagaaaaaaaacggaccaccgtctgttgaagatcttcaaatattaacaaaaattcttcgtgccatgaaggaggacagtgaaaaagttccgagcttgttaactgattatattctgaaagtgctgtgtcctacatagagcagcaactttatctgcggtgggctccaagctagatttccgacagcattattctgagagctggctaccattacccttcttgctattggaaactcagcacatttgaacttgggtttgattcagtattaacagatct

SEQ ID NO: 264 - DNA, 1033 bp, Homo sapiens
ggacggtgcaagaaatgcactgaaggcccaattgacctggtctttgtgatcgatggatccaagagtcttggagaagagaattttgaggtcgtgaagcagtttgtcactggaattatagattccttgacaatttcccccaaagccgctcgagtggggctgctccagtattccacacaggtccacacagagttcactctgagaaacttcaactcagccaaagacatgaaaaaagccgtggcccacatgaaatacatgggaaagggctctatgactgggctggccctgaaacacatgtttgagagaagttttacccaaggagaaggggccaggcctttttccacaagggtgcccagagcagccattgtgttcaccgacggacgggctcaggatgacgtctccgagtgggccagtaaagccaaggccaatggtatcactatgtatgctgttggggtaggaaaagccattgaggaggaactacaagagattgcctctgagcccacaaacaagcatctcttctatgccgaagacttcagcacaatggatgagataagtgaaaaactcaagaaaggcatctgtgaagctctagaagactccgatggaagacaggactctccagcaggggaactgccaaaaacggtccaacagccaacagaatctgagccagtcaccataaatatccaagacctactttcctgttctaattttgcagtgcaacacagatatctgtttgaagaagacaatcttttacggtctacacaaaagctttcccattcaacaaaaccttcaggaagccctttggaagaaaaacacgatcaatgcaaatgtgaaaaccttataatgttccagaaccttgcaaacgaagaagtaagaaaatttacacagcgcttagaagaaatgacacagagaatggaagccctggaaaatcgcctgagatacagatgaagattagaaatcgcgacacatttgtagtcattgtatcacggattacaatgaacgcagtgcagagccccaaagctcaggctattgttaaatc

SEQ ID NO: 265 - DNA, 2333 bp, Homo sapiens
ggcacgaggctagagcgatgccgggccggagttgcgtcgccttagtcctcctggctgccgccgtcagctgtgccgtcgcgcagcacgcgccgccgtggacagaggactgcagaaaatcaacctatcctccttcaggaccaacgtacagaggtgcagttccatggtacaccataaatcttgacttaccaccctacaaaagatggcatgaattgatgcttgacaaggcaccaatgctaaaggttatagtgaattctctgaagaatatgataaatacattcgtgccaagtggaaaagttatgcaggtggtggatgaaaaattgcctggcctacttggcaactttcctggcccttttgaagaggaaatgaagggtattgccgctgttactgatatacctttaggagagattatttcattcaatattttttatgaattatttaccatttgtacttcaatagtagcagaagacaaaaaaggtcatctaatacatgggagaaacatggattttggagtatttcttgggtggaacataaataatgatacctgggtcataactgagcaactaaaacctttaacagtgaatttggatttccaaagaaacaacaaaactgtcttcaaggcttcaagctttgctggctatgtgggcatgttaacaggattcaaaccaggactgttcagtcttacactgaatgaacgtttcagtataaatggtggttatctgggtattctagaatggattctgggaaagaaagatgccatgtggatagggttcctcactagaacagttctggaaaatagcacaagttatgaagaagccaagaatttattgaccaagaccaagatattggccccagcctactttatcctgggaggcaaccagtctggggaaggttgtgtgattacacgagacagaaaggaatcattggatgtatatgaactcgatgctaagcagggtagatggtatgtggtacaaacaaattatgaccgttggaaacatcccttcttccttgatgatcgcagaacgcctgcaaagatgtgtctgaaccgcaccagccaagagaatatctcatttgaaaccatgtatgatgtcctgtcaacaaaacctgtcctcaacaagctgaccgtatacacaaccttgatagatgttaccaaaggtcaattcgaaacttacctgcgggactgccctgacccttgtataggttggtgagcacacgtctggcctacagaatgcggcctctgagacatgaagacaccatctccatgtgaccgaacactgcagctgtctgaccttccaaagactaagactcgcggcaggttctctttgagtcaatagcttgtcttcgtccatctgttgacaaatgacagatctttttttttttccccctatcagttgatttttcttatttacagataacttctttaggggaagtaaaacagtcatctagaattcactgagttttgtttcactttgacatttggggatctggtgggcagtcgaaccatggtgaactccacctccgtggaataaatggagattcagcgtgggtgttgaatccagcacgtctgtgtgagtaacgggacagtaaacactccacattcttcagtttttcacttctacctacatatttgtatgtttttctgtataacagccttttccttctggttctaactgctgttaaaattaatatatcattatctttgctgttattgacagcgatattattttattacatatcattagagggatgagacagacattcacctgtatatttcttttaatgggcacaaaatgggcccttgcctctaaatagcactttttggggttcaagaagtaatcagtatgcaaagcaatcttttatacaataattgaagtgttccctttttcataattactctacttcccagtaaccctaaggaagttgctaacttaaaaaactgcatcccacgttctgttaatttagtaaataaacaagtcaaagacttgtggaaaataggaagtgaacccatattttaaattctcataagtagcattgatgtaataaacaggtttttagtttgttcttcagattgatagggagttttaaagaaattttagtagttactaaaattatgttactgtatttttcagaaatcaaactgcttatgaaaagtactaatagaacttgttaacctttctaaccttcacgattaactgtgaaatgtacgtcatttgtgcaagaccgtttgtccacttcattttgtataatcacagttgtgttcctgacactcaataaacagtcactggaaagagtgccagtcagcagtcatgcacgctgataaaaaaaaaaaaaaaaaa

SEQ ID NO: 266 - DNA, 3136 bp, Homo sapiens
  misc_feature (1)...(3136): n=a,t,g or c
ccccgccttcacccactgcctctgcctccctggggcagagctgtttcccagacgggtggggcggggcccaactgtcccagctccttcagccctttctgtccctcccagtgaggccagctgcggtgaagagggtgctctcttgcctggcgttccctctgcacggctgccccctcccaccctgcccactaagccagacccactgtcgccattcccacttctggtcctgccacctcctgagctgccttcccgcctggtctgggtagagtcatggcctcgagcacaggtgaccggagccaggcggtgaggcatggactgagggcgaaggtgctgacgctggacggcatgaacccgcgtgtgcggagagtggagtacgcagtgcgtggccccatagtgcagcgagccttggagctggagcaggagctgcgccaggtatggcccagggcccctcgctgccctccaggtcacaatggggtggccgagttggccccagccccactggcacatgggacaagggctgaggggttaggtagggcacagtctccctgcctgcacccctcccagggtgtgaagaagcctttcaccgaggtcatccgtgccaacatcggggacgcacaggctatggggcagaggcccatcaccttcctgcgccaggtgaggcttctctgcactccctcccggagcacccccccacccccagcccatgtaccctggcctcagcactccgtctctcaggtcttggccctctgtgttaaccctgatcttctgagcagccccaacttccctgacgatgccaagaaaagggcggagcgcatcttgcaggcgtgtgggggccacagtctgggtgagagagagccagggccagggccaggcggaagcagagggccgcccttgccactggaggagggaagtcccttgggagggctgaggagaacttcacctgtaccttcccaatcctttcctgcccgactccaggggcctacagcgtcagctccggcatccagctgatccgggaggacgtggcgcggtacattgagaggcgtgacggaggcatccctgcggaccccaacaacgtcttcctgtccacaggggccagcgatgccatcgtggtaggctgggcatgggcaccaagacattcctgacactgcagagggggcgcccagggtgggggacaggtgcggccccaggccctcgccaaccctgccttccccttcctttccgcagacggtgctgaagctgctggtggccggcgagggccacacacgcacgggtgtgctcatccccatcccccagtacccactctactcggccacgctggcagagctgggcgcagtgcaggtggattactacctggacgaggagcgtgcctgggcgctggacgtggccgagcttcaccgtgcactgggccaggcgcgtgaccactgccgccctcgtgcgctctgtgtcatcaaccctggcaaccccaccggtgcgttccccgccgccccgcccaattccccccgcgccaacgttgcgttccccgccgccccgcccaattccccccgcgcccacggtgcgttccccgccgccccgcccaactccccccgcgcccacggtgcgttccccgccgccccgccccactccccccgcgcccacggtgcgttccccgccgccccgccccactccctccgcgcccacggtgcgttccccgccgccccgccccactcctccccacccaacgtgcgccctggcccggcnngccggtccgctggaccccgctgcccagcggagggcagtgcgcccccttggctcacccagcactgctgcctccccggcaccccagggcaggtgcagacccgcgagtgcatcgaggccgtgatccgcttcgccttcgaagagcggctctttctgctggcggacgaggtcgcggcgggggagcggggagccgggcaacagtccgcccccgtgacgccttgcgccccttaccgaggtgtaccaggacaacgtgtacgccgcgggttcgcagttccactcattcaagaaggtgctcatggagatggggccgccctacgccgggcagcaggagcttgcctccttccactccacctccaagggctacatgggcgagtgcgtgcaacgaggcgggtgggggctcgcgggccatggccaggccctcctcgcccgatgggccaccccctcctccgcacctgacctggccgtgcgcaggtgcgggttccgcggcggctatgtggaggtggtgaacatggacgctgcagtgcagcagcagatgctgaagctgatgagtgtgcggctgtgcccgccggtgccaggacaggccctgctggacctggtggtcagcccgcccgcgcccaccgacccctcctttgcgcagttccaggctgtgagttgggggcaggagggggtccaggtgacctaatcaggggtgggggatccgagtgccgtgccctgatgggccctccctccgcggccacaggagaagcaggcagtgctggcagagctggcggccaaggccaagctcaccgagcaggtcttcaatgaggctcctggcatcagctgcaacccagtgcagggcgccatgtactccttcccgcgcgtgcagctgcccccgcgggcggtggagcgcgctcaggtcaggcgggggcggggcctgcggggtgggtaggggggtttgggtatccctctctgacggctctccgtccacaggagctgggcctggcccccgatatgttcttctgcctgcgcctcctggaggagaccggcatctgcgtggtgccagggagcggctttgggcagcgggaaggcacctaccacttccggtgaggcctggccctcactccctgtcccgccaccctggcccttcactcactgtcaactcctttcaggatgaccattctgccccccttggagaaactgcggctgctgctggagaagctgagcaggttccatgccaagttcaccctcgagtactcctgagcaccccagctggggccaggctgggtcgccctggactgtgtgctcaggagccctgggaggctctggagcccactgtacttgctcttgatgcctggcggggtggggtggggggggtgctgggcccctgcctctctgcaggtccctaataaagctgtgtggcagtctg

SEQ ID NO: 267 - DNA, 4040 bp, Homo sapiens
gtcgcctctcacccgccccggccgctccagcccgaggcgccccgaccccgcgccactccgcgcccggccagccgcccgcagccatggggctcctgcccaagctcggcgtgtcccagggcagcgacacctctactagccgagccggccgctgtgcccgctcggtcttcggcaacattaaggtgtttgtgctctgccaaggcctcctgcagctctgccaactcctgtacagcgcctacttcaagagcagcctcaccaccattgagaagcgctttgggctctccagttcttcatcgggtctcatttccagcttgaatgagatcagcaatgccatcctcatcatctttgtcagctactttggcagccgggtgcaccgtccacgtctgattggcatcggaggtctcttcctggctgcaggtgccttcatcctcaccctcccacacttcctctccgagccctaccagtacaccttggccagcactgggaacaacagccgcttgcaggccgagctctgccagaagcattggcaggacctgcctcccagtaagtgccacagcaccacccagaacccccagaaggagaccagcagcatgtggggcctgatggtggttgcccagctgctggctggcatcgggacagtgcctattcagccatttgggatctcctatgtggatgacttctcagagcccagcaactcgcccctgtacatctccatcttatttgccatctctgtatttggaccggctttcgggtacctgctgggctctatcatgctgcagatctttgtggactatggcagggtcaacacagctgcagttaacttggtcccgggtgacccccgatggattggagcctggtggctaggcctgctcatttcttcagctttattggttctcacctctttccccttttttttcttccctcgagcaatgcccataggagcaaagagggctcctgccacagcagatgaagcaaggaagttggaggaggccaagtcaagaggctccctggtggatttcattaaacggtttccatgcatctttctgaggctcctgatgaactcactcttcgtcctggtggtcctggcccagtgcaccttctcctccgtcattgctggcctctccaccttcctcaacaagttcctggagaagcagtatggcacctcagcagcctatgccaacttcctcattggtgctgtgaacctccctgctgcagccttggggatgctgtttggaggaatcctcatgaagcgctttgttttctctctacaaaccattccccgcatagctaccaccatcatcaccatctccatgatcctttgtgttcctttgttcttcatgggatgctccaccccaactgtggccgaagtctacccccctagcacatcaagttctatacatccgcagtctcctgcctgccgcagggactgctcgtgcccagattctatcttccacccggtctgtggagacaatggaatcgagtacctctccccttgccatgccggctgcagcaacatcaacatgagctctgcaacctccaagcaactgatctatttgaactgcagctgtgtgaccgggggatccgcttcagcaaagacaggatcgtgccctgtcccctgtgcccacttcctgctcccggccatcttcctcatctccttcgtgtccctgatagcctgcatctcccacaaccccctctacatgatggttctgcgtgtggtgaaccaggaggaaaagtcatttgccatcggggtgcagttcttgttgatgcgcttgctggcctggctgccatctccagccctctatggcctcaccattgaccactcctgcatccggtggaactcgctgtgcttggggaggcgaggggcctgcgcctactatgacaacgatgctctccgagacaggtacctgggcctgcagatgggctacaaggcgctgggcatgctgctgctttgcttcatcagctggagggtgaagaagaacaaggagtacaacgtgcagaaggcggcaggcctcatctgaccccaccctgggccactgcctgctccagagagtggaccttgactcttccacacctgcctatactcactaatgttaacacgtcatttcctttttgtatttttaaacaagaaagaaaaccccagtcctcatttgccttccctacctcttcctcccagagtcctccccacagttcctaagggccactgtgtacccgggctgtgtgggccagaactggggggctgagtcttccctggccccttggaagaggcccccagatgcccaggctcacttcagtgttgagtcctccattgaggatgcccactgaggcagccaggcccctcaccagccctggggggaatcctaaacagagagagaaaaagggtatctgcccttcttgccaggcagctccactctcccgctgactgcccacaccctgcagagtggcaggggtgaaaggaagaaggaagtggctgagttattaatagccagagccactgggagactggggagactggctgtaacccccttcacacctgggtttggcatcagcacagactacgggaggggctggctccctccccctcagaccctcacttcctgtacctagaggccattctggatgctgccatgttgggaagtacagtctctgcccattacctgcatgcaggcaccagagcagggactgagaaaccccaaggatgggtcatctaagtgctgtccatatgaaccctggactttctgtccttagatcctcacatgttatccctgtctttctggggtacgtttcaaactgaggaagctacaacacagtgaagacccaaggaaggcctatgaaatggtcctgatgcccaacctcccaccccttcaatgtggggacgagaccccctcatctcagagtaatgggaagaacctcccacatctccctggcagcagatgaggtggcttcacatgcacttccctgtctggacttcagcccgtattccgaggagtagagaggcagaagagatgtcagcaaagcaagtgatgaagcagagtggatgtccactgtcaccaagctggatggcaagctgcggcccacaaaacagccagtcaggttggctttcctggtttcagacatgctcataccattcccattttctcagcctcttctctgcctccagagaggtggatgcctgggttgagagacacagctgctacgtgatagatgttgagagacagaagccaacgaaggaggtcattcatcaacaaatatatttattggagaccgactttgtgcaaagcaatgctaatcagggttctccatggagcttccctcagctcttacctcacctccctccatttacattagggccttctcccagggtgtgctcggtgggcagtgtgggactgggggtgtgggagttggtgagagcaggaggagaggtggggacagcaagaagccacagattggcatgaaggatcctgacctgactatccatgccatccatggcccccagactgactctgcacctggccctttgccagacagctctgtctccccatgtcctctggaacagctgggcatgggtcatggccattcatgacccttaagtgccacccttcttggaagaccccctccagaagcatactggaagccacctctggaaaagcctcatatggtgatatgccaaaatatttatgtcaatgtccaaacaaagtccaatgccatgagactgaagtctttgtggaaaccactgttacagacaagcttatttccaaagccacctcatttccaaacatctcactcaggaagggaggctcaatgtaacctcaggggccagttttagcatttgaaatggttctgcttggaaaatgatgccctgcaactaaccctggtctttcccatggcaatttaaccacatttggaaggcactgccttcagctgagtttatgaacaatgaatgccaaccttcaggttctagaagattggttgcactcccaaacctttattctattatattactattaaaatattctaattttgctattgaggtaaaaaaaaaaaaa

SEQ ID NO: 268 - DNA, 1208 bp, Homo sapiens
gaaagtggcgtggtaaccaggcaactactgatcaatcccctccccggctgatttgcgcatcaggaggaggactgagcttatctgactccagagctttcaggagggaagaaagatgtcagatgaagatgatctagaagactctgagccagaccaggatgattctgagaaagaagaggacgagaaggagacagaggagggggaggactacagaaaagagggggaagagttccctgaggaatggctgcccacccccctcacggaggacatgatgaaggaagggctttctctgctctgtaagacaggcaatgggctggctcatgcttatgtcaagctggaggttaaagagagggacctgacagacatctacttgctgcgctcctacatccatctgcgctatgtggatatttctgagaaccacctgacagacctgtctccactcaactacctcacccacctgctctggctcaaggctgatggcaatcggctgcgaagtgcccagatgaatgaactgccctacctgcagattgctagttttgcttataaccagattactgacactgaaggcatctctcatcctcgtcttgaaaccctgaatctcaaagggaacagcatccacatggtgacaggtctggaccccgagaagttgatcagcctgcacacagtggagcttcgggggaaccagctggaaagcaccctgggaatcaatcttcctaagctgaagaacctctacctggcccaaaacatgctgaagaaggtggaaggcttggaggatctgagcaatctcaccaccttgcatcttcgagacaaccagattgacaccctgagtggcttctccagagaaatgaaatcattgcagtacctcaacctgaggagatcaaagacgctggccttcagacctgatcagactcccaggggcagccaccacatgtatgacagaggacagaggatgcctgtttttgccccaaagctggaaattcatcacaacctgaggcccaggatctgctctgtgccggtcctctgggcagtgtggggtgcagaatggggtgcctaggcctgagcgttgcctggagcctaggccgggggccgccctcgggcaggcgtgggtgagagccaagcccgcgtgggccgcggggtgctggtaggagtggttggagagacttgcgaaggcggctggggtgttcggatttccaataaagaaacagagtgat

SEQ ID NO: 269 - DNA, 2815 bp, Homo sapiens
tgcttatcaacaaacaccttaatttatcaaacacagcaaagctagtgacagctgagaggtccatgtctgggtagaaccaggcccacgatgctgcctctcccgtgttctggagttcagctgcagggattctgctgatgtgcccagcaccatcgttctgtttgtgcttaaatggcacagcatttggtcagcacatctgaaaaggaaggtgtgagaagcaaagcccatggccacgttcccctgccagttatgtggcaagacgttcctcaccctggagaagttcacgattcacaattattcccactccagggagcggccgtacaagtgtgtgcagcctgactgtggcaaagcctttgtttccagatataaattgatgaggcatatggctacccattctccccagaaatctcaccagtgtgctcactgtgagaagacgttcaaccggaaagaccacctgaaaaaccacttccagacccacgaccccaacaaaatggcctttgggtgtgaggagtgtgggaagaagtacaacaccatgctgggctataagaggcacctggccctccatgcggccagcagtggggacctcacctgtggggtctgtgccctggagctagggagcaccgaggtgctactggaccacctcaaagcccatgcggaagagaagccccctagcggaaccaaggaaaagaagcaccagtgcgaccactgtgaaagatgcttctacacccggaaggatgtgcgacgccacctggtggtccacacaggatgcaaggacttcctgtgccagttctgtgcccagagatttgggcgcaaggatcacctcacccggcataccaagaagacccactcacaggagctgatgaaagagagcttgcagaccggagaccttctgagcaccttccacaccatctcgccttcattccaactgaaggctgctgccttgcctcctttccctttaggagcttctgcccagaacgggcttgcaagtagcttgccagctgaggtccatagcctcaccctcagtcccccagaacaagccgcccagcctatgcagccgctgccagagtccctggcctccctccacccctcggtatcccctggctctcctccgccaccccttcccaatcacaagtacaacaccacttctacctcatactccccacttgcaagcctgcccctcaaagcagatactaaaggtttttgcaatatcagtttgtttgaggacttgcctctgcaagagcctcagtcacctcaaaagctcaacccaggttttgatctggctaagggaaatgctggtaaagtaaacctgcccaaggagctgcctgcagatgctgtgaacctaacaatacctgcctctctggacctgtcccccctgttgggcttctggcagctgccccctcctgctacccaaaatacctttgggaatagcactcttgccctggggcctggggaatctttgccccacaggttaagctgtctggggcagcagcagcaagaacccccacttgccatgggcactgtgagcctgggccagctccccctgccccccatccctcatgtgttctcagctggcactggctctgccatcctgcctcatttccatcatgcattcagataattgatttttaaagggtatttttcgtattctggaagatgttttaagaagcattttaaatgtcagttacaatatgagaaagatttggaaaacgagactgggactatggcttattcagtgatgactggcttgagatgataagagaattctcgaactgcatgtattgtgccaatctgtcctgagtgttcatgctttgtaccaaatttaatgaacgcgtgttctgtaatcaaactgcaaatattgtcataaccaacatccaaaatgacggctgctatatataagtgtttgtcatatggaatttaatcgtaagccatgatcataatgttaactaaataactttatgtggcactgcctagtaagggaactatggaaaggtttggatttctccaaatctgggagaattttcaaaataagaaaataacctttatatgatatactatgactaggctgtgtatttcttttcagggatttttctaccttcagggttggatgtagtttagttactattaccatagccaacctgtagttttacatatacattttcttgtggagcaatagagttctccattttacagaagcattttaaatgtagtttgaatattttccacaagatgctgcaatgtgagttatcacttcatttatcttaaagaaagactaaactggttgtcagttacatctgacagaaaaaaaaaaaaaaatcactgtgtaaccagggttaagtggttaaaataatccagggcgtcagtcaaaggcattttgctgactttaatattgattatatttttaacagggaatttaaggaaaatattaccggggaattaaaaaatatatatatattaaaacaagaattttcctttgcccctgtccagcctaaacctacctacctcaaggctgcctaagttcctaagtattgtttgtaatcacccaataaataagtgcatttgtaattcatcagtcattattagcttttattaaaagaagattacgttttacaatgtaactataatctcttgaatttggtatcttattaatgagttttaaagatgtaaaacctaaccttttttaaagctccattgtcttatgtttttagaggcttttccgtaaacatatatcttacatataataaacttttcaaatcttgcaaaaaaaaaaaaaaaaaaaaaaaaaaaaaaaaaaaaaaaaaaaaaaaaaaaaaaaaaaaaa

SEQ ID NO: 270 - DNA, 756 bp, Homo sapiens
atggctcagcgacttcttctgaggaggttcctggcctctgtcatctccaggaagccctctcagggtcagtggccacccctcacttccaaagccctgcagaccccacaatgcagtcctggtggcctgactgtaacacccaacccagcccggacaatatacaccacgaggatctccttgacaacctttaatatccaggatggacctgactttcaagaccgagtggtcaacagtgagacaccagtggttgtggatttccacgcacagtggtgtggaccctgcaagatcctggggccgaggttagagaagatggtggccaagcagcacgggaaggtggtgatggccaaggtggatattgatgaccacacagacctcgccattgagtatgaggtgtcagcggtgcccactgtgctggccatgaagaatggggacgtggtggacaagtttgtgggcatcaaggatgaggatcagttggaggccttcctgaagaagctgattggctgacaagcagggatgagtcctggttcccttgcccgcgtgggaccccaatagaactcagcccttccatgccagcccttcctgctgcctccctcctgtctggctcctggggcccatgcttagagcccaggctccagccctgagtgcttccgagctggcggactgcccaggggccatcagaggatggtggtgctgctgctgatccggggaccgctgtcttccctcccatacgcctttcatccctccttctagggcctatgg

SEQ ID NO: 271 - DNA, 2150 bp, Homo sapiens
  misc_feature (1)...(2150): n=a,t,g or c
ggtcccggatccgcgcgggtttggggatccanatgtccagccccgtgtccccctccaaacatccagtccctctcatattgcctttgaaattagcagcctctgggtgaccagaccttggccctcagaggaatcccgganaaaggtanaaccagcttcgcgttgggaacgcaggcgcgcttacgcatttagtgagggtttggcggtctccatanttaccgccgccgcgcgtgacntcatantggagcgctgagggcttggtggcgtggggtgggggctgtcctactgatcctgaatttgggtcactggtaanangagttgcccattccanccaggtggaacggggaggggtagccacatgtctcagatctgccattgtctgcgaaaagaaactgctgcgaggaccatccccaatcccctgcttcccttgggaagagtaaccgccgttttgtaggacacttggggacaaccccgcttgtcctgaaatttattgacacggtaaatagtatttcctgtgtgccgaggatgcagttaaaccaacactgaccccctgcccttgagaaacacaagatggctacagaaccaaagaaagctgcagcccagaactctccagaggatgaaggacttctgatagtgaagatagaagaggaagaatttatccatgggcaggacacttgcttacagagaagtgaactccttaagcaggagctctgcaggcagctttttaggcagttctgctaccaggattctcctggacctcgcgaggcactgagccgcctccgggagctctgctgtcagtggctgaagccagagatccataccaaggaacagattctggaactgctggtgctagagcagttcctgaccatcctgccaggagatttgcaggcctgggtacatgaacattacccagagagtggagaggaggcagtgaccatactagaagatttggagagaggcactgatgaagcagtactccaggttcaagcccatgaacatggacaagaaatattccagaaaaaagtgtcacctcctggaccagcacttaatgtcaagttacagccagtggagaccaaggcccattttgattcatcagaaccccagctcctatgggactgtgataatgagagtgaaaacagtagatccatgccaaagctggaaatttttgaaaaaattgaatcacagagaattatatctggaagaatctcaggatacatatcagaagcatctggtgagtctcaagacatctgtaagtctgcaggcagggtaaagagacaatgggaaaaagaatcaggggagtctcagagactctcgtctgcccaggatgaaggttttggtaaaatcctcacccacaaaaatacagtcagaggtgaaataataagccacgatggatgtgagaggagattaaatctgaactcaaatgaattcacacaccagaaatcttgtaaacatggtacctgtgaccagagcttcaaatggaactcagattttattaaccatcaaataatttatgctggagaaaaaaatcaccaatatggaaaatctttcaagagcccaaaacttgctaaacatgcagcagttttcagtggagataaaactcatcagtgtaatgaatgtgggaaagctttcaggcacagctcaaaacttgctaggcatcagagaatccacactggagagagatgctatgaatgtaatgaatgtgggaaaagctttgcagagagctcagatcttactagacatcggcgaattcacactggggaaagaccctttggttgcaaagaatgtgggagagcattcaacctgaactcacatcttatcaggcatcagagaattcacaccagagagaaaccctacgagtgtagtgaatgtgggaaaaccttccgagtgagctcacatcttattcgacactttagaattcacactggagaaaaaccctatgaatgcagtgagtgtggaagagccttcagtcagagctcaaaccttagtcaacaccagagaattcacatgagggaaaacctattaatgtaaggaacttaaatttgtaagtaaatgctgaggaaatggcacaatatgaaaaatattaaataaaaaataaatattgggcaagtggaagactgaaaaaaaaaaaaaaaaaaaaaaaaaaaaaaaaaaaa

SEQ ID NO: 272 - DNA, 1275 bp, Homo sapiens
ctggacttggaggatcagcagttgcaggtcatgcctcagacaagattgaaaacatggtgcctgttaaagatcgaatcattaaaattagctttaatgcagatgtgcatgcaagtctccagtggaactttagacctcagcaaacagaaatatatgtggtgccaggagagactgcactggcgttttacagagctaagaatcctactgacaaaccagtaattggaatttctacatacaatattgttccatttgaagctggacagtatttcaataaaatacagtgcttctgttttgaagaacaaaggcttaatccccaagaggaagtagatatgccagtgtttttctacattgatcctgaatttgctgaagatccaagaatgattaaagttgatcttatcactctttcttacactttttttgaagcaaaggaagggcacaagttgccagttccaggatataattgaagtcagcaactaagtcttccttcaaagttgtgatttttgggaaaatcatatatcctatcttctcaaaggagaaatattgtacaataatatgaaggcttatattttaaataattattttttctcaactaatttttttcacttaaacttgagagaacaagttcagcttttatcataagaaactcatatgcctagctagaatatatgactgactattcaataccatactgaagagtttgatactattaaaataagccgctttgttttttaaatatgcaggcatgggttcagcttaattccataattcccttccagattattaactcttcatacttacagcaatgaatctgacaatgtttttcaaaaatgtatgctcagggttatttgtttcaagtcataggccagaacttctaaccatgtttattgtgtctaaaagagttggttgctattttccttcattatgaatagtcagtattttaaaagctcaaagtagaagaggagtcactaagccctaacagcttgtccaaagatttaaattcttatttcaaatttgatttgtcctttaaggtttagggctattttatattcagagttctgaataattactttgaaactgtagtatcataaaattgaaataaaatacatctactaggctgttagccaaagcatcaccattacaagtccatgaatgttaaaatgtacaggtgggattgtgaagatttactgacatcaaaagttcttctggaaacaaacctttgttaaaaaaaaaaagtattaaattgttttaatagtgatttaaaaaaaaaaaaaaaaaaaa

SEQ ID NO: 273 - DNA, 1719 bp, Homo sapiens
caacttatcagtttgttcttcttttatattctctaaagctttctgttaaaaatggtggtgcttctgctgctataacgttgtcaagaaacttgtgggtcttttacatatgtcacagggatgcactcatttagataggaggctcctcacgtatctttcctggaaaatcctgtctctgtttttggctttttctgaaatagctgagaggatctatgattcacacccttaatatcttcaaagagtcttgtgtgtgacctgatactcagaccttttgatgtttctgaagtattagcaaaaggttatacagccatatcttcatcactttctctagagtaaaggctgtcctgacggtgaatcttagttttagtggcttttgccatttgaataggccgcgaatttcccaaatcatcaagtcctggtttctttatatttaacaggtcttccctcaatctacctctttccacattttactataatcagcaagaagacagcaggctgtaccttccacagcttgcttggaaatatcctcagctaaatattgaagtcatcacttaaaagttctgctttacacataacggcaggacacaactcagcttagcttttcgccactatgtaacaaggactcctttcctccacttctccagtaacatattcctcattttttaccaacagtctattcatgatgatttagatattctatggcaatcgaggtattctctattatgctcctttcttcaaggccgccctagcattaacattccatatttctactaacagtctgtttaaggcagtttagcttcttttctggcatgctcctcagaattcttccagcctccacctactgcccaattccagagccacttttctacttttaggtatttgttacagcagcacctcaagtacctagaaaactcttttatgcctgcttctctgccagatgacttgaatatggtactagatttggaattcacctttctccagggtcactgtttatttcaaagaggtgaatttacctgtgctagggttttcacactgggagtgctaccagaactaccacaggatgaaagtggtgagcccaccactgcagagaagttttctcagtgccgtaatatagaggaattctcaaaataagccctactccttttcacttactgaaaacaacttggataatgtgtaacagccagccccatttcaaaaagattaccaggggtaaaacaactttttcatgggtcaaaatcatcttccgaagaaaatgatttcttaaaagaattgaacattgtaaatcaaagggcattgtcctgttttggattaacaaaacaggaaaaataaccaatccttgtaaaattatttgaaattttcttgtttttatcagttgagtgcctatagatgcacatacaaaaacaactgccatttttgtatataatagtcttccaagatagagatttacattaggagagaattaaacatccaggagggatgaacagtatttcgtgtgtgctatgtagtgttttgcttcattgagagtcattttcatgaattatttttactactgcagtcatcttaaatttataatcatctcaaaaaagatgtcacaatgaacagacaaccatctgtgaggtcagtcattttgcatgatgtatgtaatcaaaaagtttgaaatgtctgcttactaataaagaatgttttcactgaaacttaaaaaaaaaaaaaaaaaaaaaaaaa

SEQ ID NO: 274 - DNA, 1616 bp, Homo sapiens
tgctgaaccatttttcttaggatgcagccgtctcactcccttgtcctgtaaatcgtgtattcatgttgatgattcttggagataggtttcactttttcccagctgcgtccacaggaaaggggagtcggatgccagctgcaccccgcctggctcgcacaggctaagaccacagacagagcagggcttcccggagccacacaggccacgcaccccaggaacccttgctgccgcgggccaggaacaggaatgtgttggtgcctgagacaccaaatggaagaagcacatcaagactgttctcctgcggccaacactggcccggaagccgccctccatacaggccctcagggggcctgccttctgcgcctcagtcccccgtgcatccctgggcctgggtatcacatgctctccaggaaagggacggaatcaatcgtgtgaccgatgggctcgcaaggatgggtgccgccgtgggagccctgcctctggtgctggcaagggattgggtttgtgtgggtgtctctagcctgcagagtgcagtgagtgagagtccttgggagcgcggcgctgcctgtagctgtgcctggggatgcacgtggccacgggatttcagtgggacagcgctcccacaggggctgggggtgggggtggggtttcttagttactgttggaaagggaaaaattcaccatatccaaggggagagacgatgggctgggtttgtttactccaacttcccttctacacccctcctgcaggacagtacgatttggggagaacccagctccccactttatctgcagactctgggacctgacaaaacagtcagagcctgagtgcactgcagcctgaactcccttgagcagcgctataagggactttgcactttaaaaaggggatgcctgtcagtaaatcccctgtgcattgactagaactggggggctgcgcccgctccctccttaatcctagatgatttgctcatgaaatagaggtgggggacgaccgcatgcactctgggaggtgcagccctaaggggtggactccagatctccctgcaagagacagcttggcttggctttggctgttggggaggagtccctgccatcccggtgagcctggggctgttgcttagggtcttctgggtggacacgtggagaaagagaaggcaaacgttggaacactaggaaaagctagaaattcagacaacacacatggatccccttaaaacatgtaaatgtgtcagaacacggttgacctgccgccttcttgaacctggtggcccccgttggaactatcagtggcgtctcccatgcacacgccctctgctttctctttcctagactcgcggtgctcacatccagacattaccttgttggtagcccccaagtggcgtgcagtgacaccagtatcttctctgttgcatttttgcaatcttgtgtcccgctcggtgatgttctacaactctgttttaaggttgagaaagtttcaagggtgaagatctcaaaacagtgctaaaatcaaaggtgtttgctgtgaagaaaaacatgtgtatatattgcaccttgagttgtcagaaggtagaaactgaaataaactaactttaaaaaaaaaaaaaaaaaaaaaa

SEQ ID NO: 275 - DNA, 6608 bp, Homo sapiens
ccttcttttaaggagtttgccgcgagcgcgtctccttcattcgcaggctgggcgcgttcgcagtcggctggcggcgaaggaaggcgctctcgggacctcacgggcgcgcgtcttttggctcttgcccctgtccctgcggcttggggaaagcgtaacccggcggctaggcgcgggagaagtgcggaggagccatgggcgccgggagctccaccgagcagcgcagcccggagcagccgcccgaggggagctccacgccggctgagcccgagcccagcggcggcggcccctcggccgaggcggcgccagacaccaccgcggaccccgccatcgctgcctcggaccccgccaccaagctcctacagaagaatggtcagctgtccaccatcaatggcgtagctgagcaagatgagctcagcctccaggagggtgacctaaatggccagaaaggagccctgaacggtcaaggagccctaaacagccaggaggaagaagaagtcattgtcacggaggttggacagagagactctgaagatgtgagcgaaagagactccgataaagagatggctactaagtcagcggttgttcacgacatcacagatgatgggcaggaggagaaccgaaatatcgaacagattccttcttcagaaagcaatttagaagagctaacacaacccactgagtcccaggctaatgatattggatttaagaaggtgtttaagtttgttggctttaaattcactgtgaaaaaggataagacagagaagcctgacactgtccagctactcactgtgaagaaagatgaaggggagggagcagcaggggctggcgaccaccaggaccccagccttggggctggagaagcagcatccaaagaaagcgaacccaaacaatctacagagaaacccgaagagaccctgaagcgtgagcaaagccacgcagaaatttctcccccagccgaatctggccaagcagtggaggaatgcaaagaggaaggagaagagaaacaagaaaaagaacctagcaagtctgcagaatctccgactagtcccgtgaccagtgaaacaggatcaaccttcaaaaaattcttcactcaaggttgggccggctggcgcaaaaagaccagtttcaggaagccgaaggaggatgaagtggaagcttcagagaagaaaaaggaacaagagccagaaaaagtagacacagaagaagacggaaaggcagaggttgcctccgagaaactgaccgcctccgagcaagcccacccacaggagccggcagaaagtgcccacgagccccggttatcagctgaatatgagaaagttgagctgccctcagaggagcaagtcagtggctcgcagggaccttctgaagagaaacctgctccgttggcgacagaagtgtttgatgagaaaatagaagtccaccaagaagaggttgtggccgaagtccacgtcagcaccgtggaggagagaaccgaagagcagaaaacggaggtggaagaaacagcagggtctgtgccagctgaagaattggttggaatggatgcagaacctcaggaagccgaacctgccaaggagctggtgaagctcaaagaaacgtgtgtttccggagaggaccctacacagggagctgacctcagtcctgatgagaaggtgctgtccaaaccccccgaaggcgttgtgagtgaggtggaaatgctgtcatcacaggagagaatgaaggtgcagggaagtccactaaagaagctttttaccagcactggcttaaaaaagctttctggaaagaaacagaaagggaaaagaggaggaggagacgaggaatcaggggagcacactcaggttccagccgattctccggacagccaggaggagcaaaagggcgagagctctgcctcatcccctgaggagcccgaggagatcacgtgtctggaaaagggcttagccgaggtgcagcaggatggggaagctgaagaaggagctacttccgatggagagaaaaaaagagaaggtgtcactccctgggcatcattcaaaaagatggtgacgcccaagaagcgtgttagacggccttcggaaagtgataaagaagatgagctggacaaggtcaagagcgctaccttgtcttccaccgagagcacagcctctgaaatgcaagaagaaatgaaagggagcgtggaagagccaaagccggaagaaccaaagcgcaaggtggatacctcagtatcttgggaagctttaatttgtgtgggatcatccaagaaaagagcaaggagaaggtcctcttctgatgaggaagggggaccaaaagcaatgggaggagaccaccagaaagctgatgaggccggaaaagacaaagagacggggacagacgggatccttgctggttcccaagaacatgatccagggcagggaagttcctccccggagcaagctggaagccctaccgaaggggagggcgtttccacctgggagtcatttaaaaggttagtcacgccaagaaaaaaatcaaagtccaagctggaagagaaaagcgaagactccatagctgggtctggtgtagaacattccactccagacactgaacccggtaaagaagaatcctgggtctcaatcaagaagtttattcctggacgaaggaagaaaaggccagatgggaaacaagaacaagcccctgttgaagacgcagggccaacaggggccaacgaagatgactctgatgtcccggccgtggtccctctgtctgagtatgatgctgtagaaagggagaaaatggaggcacagcaagcccaaaaaggcgcagagcagcccgagcagaaggcagccactgaggtgtccaaggagctcagcgagagtcaggttcatatgatggcagcagctgtcgctgacgggacgagggcagctaccattattgaagaaaggtctccttcttggatatctgcttcagtgacagaacctcttgaacaagtagaagctgaagccgcactgttaactgaggaggtattggaaagagaagtaattgcagaagaagaaccccccacggttactgaacctctgccagagaacagagaggcccggggcgacacggtcgttagtgaggcggaattgacccccgaagctgtgacagctgcagaaactgcagggccattgggttccgaagaaggaaccgaagcatctgctgctgaagagaccacagaaatggtgtcagcagtctcccagttaaccgactccccagacaccacagaggaggccactccggtgcaggaggtggaaggtggcgtacctgacatagaagagcaagagaggcggactcaagaggtcctccaggcagtggcagaaaaagtgaaagaggaatcccagctgcctggcaccggtgggccagaagatgtgcttcagcctgtgcagagagcagaggcagaaagaccagaagagcaggctgaagcgtcgggtctgaagaaagagacggatgtagtgttgaaagtagatgctcaggaggcaaaaactgagccttttacacaagggaaggtggtggggcagaccaccccagaaagctttgaaaaagctcctcaagtcacagagagcatagagtccagtgagcttgtaaccacttgtcaagccgaaaccttagctggggtaaaatcacaggagatggtgatggaacaggctatcccccctgactcggtggaaacccctacagacagtgagactgatggaagcacccccgtagccgactttgacgcaccaggcacaacccagaaagacgagattgtggaaatccatgaggagaatgaggtcgcatctggtacccagtcagggggcacagaagcagaggcagttcctgcacagaaagagaggcctccagcaccttccagttttgtgttccaggaagaaactaaagaacaatcaaagatggaagacactctagagcatacagataaagaggtgtcagtggaaactgtatccattctgtcaaagactgaggggactcaagaggctgaccagtatgctgatgagaaaaccaaagacgtaccatttttcgaaggacttgaggggtctatagacacaggcataacagtcagtcgggaaaaggtcactgaagttgcccttaaaggtgaagggacagaagaagctgaatgtaaaaaggatgatgctcttgaactgcagagtcacgctaagtctcctccatcccccgtggagagagagatggtagttcaagtcgaaagggagaaaacagaagcagagccaacccatgtgaatgaagagaagcttgagcacgaaacagctgttaccgtatctgaagaggtcagtaagcagctcctccagacagtgaatgtgcccatcatagatggggcaaaggaagtcagcagtttggaaggaagccctcctccctgcctaggtcaagaggaggcagtatgcaccaaaattcaagttcagagctctgaggcatcattcactctaacagcggctgcagaggaggaaaaggtcttaggagaaactgccaacattttagaaacaggtgaaacgttggagcctgcaggtgcacatttagttctggaagagaaatcctctgaaaaaaatgaagactttgccgctcatccaggggaagatgctgtgcccacagggcccgactgtcaggcaaaatcgacaccagtgatagtatctgctactaccaagaaaggcttaagttccgacctggaaggagagaaaaccacatcactgaagtggaagtcagatgaagtcgatgagcaggttgcttgccaggaggtcaaagtgagtgtagcaattgaggatttagagcctgaaaatgggattttggaacttgagaccaaaagcagtaaacttgtccaaaacatcatccagacagccgttgaccagtttgtacgtacagaagaaacagccaccgaaatgttgacgtctgagttacagacacaagctcacgtgataaaagctgacagccaggacgctggacaggaaacggagaaagaaggagaggaacctcaggcctctgcacaggatgaaacaccaattacttcagccaaagaggagtcagagtcaaccgcagtgggacaagcacattctgatatttccaaagacatgagtgaagcctcagaaaagaccatgactgttgaggtagaaggttccactgtaaatgatcagcagctggaagaggtcgtcctcccatctgaggaagagggaggtggagctggaacaaagtctgtgccagaagatgatggtcatgccttgttagcagaaagaatagagaagtcactagttgaaccgaaagaagatgaaaaaggtgatgatgttgatgaccctgaaaaccagaactcagccctggctgatactgatgcctcaggaggcttaaccaaagagtccccagatacaaatggaccaaaacaaaaagagaaggaggatgcccaggaagtagaattgcaggaaggaaaagtgcacagtgaatcagataaagcgatcacaccccaagcacaggaggagttacagaaacaagagagagaatctgcaaagtcagaacttacagaatcttaaaacatcatgcagttaaactcattgtctgtttggaagaccagaatgtgaagacaagtagtagaagaaaatgaatgctgctgctgagactgaagaccagtatttcagaactttgagaattggagagcaggcacatcaactgatctcatttctagagagcccctgacaatcctgaggcttcatcaggagctagagccatttaacatttcctctttccaagaccaacctacaattttcccttgataaccatataaattctgatttaaggtcctaaattcttaacctggaactggagttggcaatacctagttctgcttctgaaactggagtatcattctttacatatttatatgtatgttttaagtagtcctcctgtatctattgtatatttttttcttaatgtttaaggaaatgtgcaggatactacatgctttttgtatcacacagtatatgatggggcatgtgccatagtgcaggcttggggagctttaagcctcagttatataacccacaaaaaacagagcctcctagatgtaacattcctgatcaaggtacaattctttaaaattcactaatgattgaggtccatatttagtggtactctgaaattggtcactttcctattacacggagtgtgccaaaactaaaaagcattttgaaacatacagaatgttctattgtcattgggaaattttgctttctaacccagtggaggttagaaagaagttatattctggtagcaaattaactttacatcctttttcctacttgttatggttgtttggaccgataagtgtgcttaatcctgaggcaaagtagtgaatatgttttatatgttatgaagaaaagaattgttgtaagtttttgattctactcttatatgctggactgcattcacacatggcatgaaataagtcaggttctttacaaatggtattttgatagatactggattgtgtttgtgccatatttgtgccattcctttaagaacaatgttgcaacacattcatttggataagttgtgatttgacgactgatttaaataaaatatttgcttcacttaaaaaaaaaaaa

SEQ ID NO: 276 - DNA, 1698 bp, Homo sapiens
tcggcacaggagcgaggagacccgagagcagacgcgccctggcgcccgccctgcgcagtcaccatggcgatgcatttcatcttctcagatacagcggtgcttctgtttgatttctggagtgtccacagtcctgctggcatggccctttcggtgttggtgctcctgcttctggctgtactgtatgaaggcatcaaggttggcaaagccaagctgctcaaccaggtactggtgaacctgccaacctccatcagccagcagaccatcgcagagacagacggggactctgcaggctcagattcattccctgttggcagaacccaccacaggtggtacttgtgtcactttggccagtctctaatccatgtcatccaggtggtcatcggctacttcatcatgctggccgtaatgtcctacaacacctggattttccttggtgtggtcttgggctctgctgtgggctactacctagcttacccacttctcagcacagcttagatggtgaggaacgtgcaggcactgaggctggagggacatggagccccctcttccagacactatacttccaactgccctttcttctgatggctattcctccaccttattcccagcccctggaaactttgagctgaagccagcacttgctccctggagttcggaagccattgcagcaaccttccttctcagccagcctacgtagggcccaggcatggtcttgtgtcttaagacagctgctgtgaccaaagggagaatggagataacaggggtggcagggttactgagcccatgacaatgcttctctgtgactcaaaccaggaatttccaaagatttcaagccagggagaagggttcttggtgatgcagggcatggaacctggacaccctcagctctcctgctttgtgccttatctacaggagcatcgcccattggacttcctgacctcttctgtctttgagggacagagaccaagctagatcctttttctcacctttctgcctttggaacacatgaagatcatctcgtctatggatcatgttgacaaactaagttttttttatttttcccattgaactcctagttggcaattttgcacattcatacaaaaaaatttttaatgaaatgatttcattgattcatgatggatggcagaaactgctgagacctatttccctttcttggggagagaataagtgacagctgattaaaggcagagacacaggactgctttcaggctcctggtttattctctgattgactgagctccttccaccagaaggcactgcctgcaggaagaagatgatctgatggccgtgggtgtctgggaagctcttcgtggcctcaatgccctcctttatcctcatctttcttctatgcagaacaaaaagctgcatctaataatgttcaatacttaatattctctatttattacttactgcttactcgtaatgatctagtggggaaacatgattcattcacttaaaatactgattaagccatgggcaggtactgactgaagatgcaatccaaccaaagccattacattttttgagttagatgggactctctggatagttgaacctcttcactttataaaaaaggaaagagagaaaatcactgctgtatactaaatacctcacagattagatgaaaagatggttgtaagctttgggaattaaaaacaaatacattttagtaaatat

SEQ ID NO: 277 - DNA, 1236 bp, Homo sapiens
actgatagctcccaaggcatcccccagcttgtgagtaacatcagtgcctgccaggtgattgctgaggctgtaagaactaccctgggtccccgtggcatggacaagcttattgtagatggcagaggcaaagcaacaatttctaatgatggggccacaattctgaaacttcttgatgttgtccatcctgcagcaaagactttggtagacattgccaaatcccaagatgctgaggtgggtgatggcaccacctcagtgaccttgctggctgcagagtttctgaagcaggtgaaaccctatgtggaggaaggtttacacccccagatcatcattcgagctttccgcacagccacccagctggcagttaacaagatcaaagagattgctgtgaccgtgaagaaggcagataaagtggagcagaggaagctgctggaaaagtgtgccatgaccgctctgagctccaagctgatctcccagcagaaagctttctttgctaagatggtggtggatgcagtgatgatgctcgatgatttgctgcagcttaaaatgattggaatcaagaaggtacagggtggagccctcgaggattctcagctggtagctggtgttgcattcaagaagactttctcttacgctgggtttgaaatgcaacccaaaaagtaccacaatcccaagattgcccttttgaatgtcgagctcgagttgaaagctgagaaagacaatgctgagataagagtccacacagttgaggattatcaggcaattgttgatgctgagtggaacattctctatgacaagttagagaagatccgtcagtctggagccaaagttgtcttgtccaaacctcccattggggatgtggccacccagtactttgctgacagggacatgttctgtgctggccgagtacctgaggaggatctgaagaggacaatgatggcctgtggaggctcaatccagaccagtgtcaatcctctgtcagcagatgtgctgggtcgatgccaggtgtttgaagagacccagattggaggcgagaggtacaatttttttactggcttgcccaaggccaagacatgcaccttcatttctccgtgcggcgccgagcagtttatggaggagacagagcggtccctgcatgatgccatcatgatcgtcaggagggccatcaagaatgattcagtggtgcctggtggcgggcccattgagatggaactctccaagtacctgcgggattactcc

SEQ ID NO: 278 - DNA, 7178 bp, Homo sapiens
gggtaactcattcgactgtggagttcttttaattcttatgaaagatttcaaatcctctggaagccaaaatgggacacagtaaacagattcgaattttacttctgaacgaaatggagaaactggaaaagaccctcttcagacttgaacaagaaactgggtctcactatgttgcccaggttgatattgaactcctggactcaagcaaccctccctctttggcctctgaaagtactgggattacaagcataagccaccgggcatggccccacttctgagcattaatttatttattgggtatgagctacagttccgattaggcccaactttacagggaaaagcagttaccgtgtatacaaattacccatttcctggagaaacatttaatagagaaaaattccgttctctggattgggaaaatccaacagaaagagaagatgattctgataaatactgtaaacttaatctgcaacaatctggttcatttcagtattatttccttcaaggaaatgagaaaagtggtggaggttacatagttgtggaccccattttacgtgttggtgctgataatcatgtgctacccttggactgtgttactcttcagacatttttagctaagtgtttgggaccttttgatgaatgggaaagcagacttagggttgcaaaagaatcaggctacaacatgattcattttaccccattgcagactcttggactatctaggtcatgctactcccttgccaatcagttagaattaaatcctgacttttcaagacctaatagaaagtatacctggaatgatgttggacagctagtggaaaaattaaaaaaggaatggaatgttatttgtattactgatgttgtctacaatcatactgctgctaatagtaaatggatccaggaacatccagaatgtgcctataatcttgtgaattctccacacttaaaacctgcctgggtcttagacagagcactttggcgtttctcctgtgatgttgcagaagggaaatacaaagaaaagggaatacctgctttgattgaaaatgatcaccatatgaattccatccgaaaaataatttgggaggatatttttccaaagcttaaactctgggaatttttccaagtagatgtcaacaaagcggttgagcaatttagaagacttcttacacaagaaaataggcgagtaaccaagtctgatccaaaccaacaccttacgattattcaagatcctgaatacagacggtttggctgtactgtagatatgaacattgcactaacgactttcataccacatgacaaggggccagcagcaattgaagaatgctgtaattggtttcataaaagaatggaggaattaaattcagagaagcatcgactcattaactatcatcaggaacaggcagttaattgccttttgggaaatgtgttttatgaacgactggctggccatggtccaaaactaggacctgtcactagaaagcatcctttagttaccaggtattttactttcccatttgaagagatagacttctccatggaagaatctatgattcatctgccaaataaagcttgttttctgatggcacacaatggatgggtaatgggagatgatcctcttcgaaactttgctgaaccgggttcagaagtttacctaaggagagaacttatttgctggggagacagtgttaaattacgctatgggaataaaccagaggactgtccttatctctgggcacacatgaaaaaatacactgaaataactgcaacttatttccagggagtacgtcttgataactgccactcaacacctcttcacgtagctgagtacatgttggatgctgctaggaatttgcaacccaatttatatgtagtagctgaactgttcacaggaagtgaagatctggacaatgtctttgttactagactgggcattagttccttaataagagaggcaatgagtgcatataatagtcatgaagagggcagattagtttaccgatatggaggagaacctgttggatcctttgttcagccctgtttgaggcctttaatgccagctattgcacatgccctgtttatggatattacgcatgataatgagtgtcctattgtgcatagatcagcgtatgatgctcttccaagtactacaattgtttctatggcatgttgtgctagtggaagtacaagaggctatgatgaattagtgcctcatcagatttcagtggtttctgaagaacggttttacactaagtggaatcctgaagcattgccttcaaacacaggtgaagttaatttccaaagcggcattattgcagccaggtgtgctatcagtaaacttcatcaggagcttggagccaagggttttattcaggtgtatgtggatcaagttgatgaagacatagtggcagtaacaagacactcacctagcatccatcagtctgttgtggctgtatctagaactgctttcaggaatcccaagacttcattttacagcaaggaagtgcctcaaatgtgcatccctggcaaaattgaagaagtagttcttgaagctagaactattgagagaaacacgaaaccttataggaaggatgagaattcaatcaatggaacaccagatatcacagtagaaattagagaacatattcagcttaatgaaagtaaaattgttaaacaagctggagttgccacaaaagggcccaatgaatatattcaagaaatagaatttgaaaacttgtctccaggaagtgttattatattcagagttagtcttgatccacatgcacaagtcgctgttggaattcttcgaaatcatctgacacaattcagtcctcactttaaatctggcagcctagctgttgacaatgcagatcctatattaaaaattccttttgcttctcttgcctccagattaactttggctgagctaaatcagatcctttaccgatgtgaatcagaagaaaaggaagatggtggagggtgctatgacataccaaactggtcagcccttaaatatgcaggtcttcaaggtttaatgtctgtattggcagaaataagaccaaagaatgacttggggcatcctttttgtaataatttgagatctggagattggatgattgactatgtcagtaaccggcttatttcacgatcaggaactattgctgaagttggtaaatggttgcaggctatgttcttctacctgaagcagatcccacgttaccttatcccatgttactttgatgctatattaattggtgcatataccactcttctggatacagcatggaagcagatgtcaagctttgttcagaatggttcaacctttgtgaaacacctttcattgggttcagttcaactgtgtggagtaggaaaattcccttccctgccaattctttcacctgccctaatggatgtaccttataggttaaatgagatcacaaaagaaaaggagcaatgttgtgtttctctagctgcaggcttacctcatttttcttctggtattttccgctgctggggaagggatacttttattgcacttagaggtatactgctgattactggacgctatgtagaagccaggaatattattttagcatttgcgggtaccctgaggcatggtctcattcctaatctactgggtgaagggatttatgccagatacaattgtcgggatgctgtgtggtggtggctgcagtgtatccaggattactgtaaaatggttccaaatggtctagacattctcaagtgcccagtttccagaatgtatcctacagatgattctgctcctttgcctgctggcacactggatcagccattgtttgaagtcatacaggaagcaatgcaaaaacacatgcagggcatacagttccgagaaaggaatgctggtccccagatagatcgaaacatgaaggacgaaggttttaatataactgcaggagttgatgaagaaacaggatttgtttatggaggaaatcgtttcaattgtggcacatggatggataaaatgggagaaagtgacagagctagaaacagaggaatcccagccacaccaagagatgggtctgctgtggaaattgtgggcctgagtaaatctgctgttcgctggttgctggaattatccaaaaaaaatattttcccttatcatgaagtcacagtaaaaagacatggaaaggctataaaggtctcatatgatgagtggaacagaaaaatacaagacaactttgaaaagctatttcatgtttccgaagacccttcagatttaaatgaaaagcatccaaatctggttcacaaacgtggcatatacaaagatagttatggagcttcaagtccttggtgtgactatcagctcaggcctaattttaccatagcaatggttgtggcccctgagctctttactacagaaaaagcagggaaagctttggagattgcagaaaaaaaattgcttggtccccttggcatgaaaactttagatccagatgatatggtttactgtggaatttatgacaatgcattagacaatgacaactacaatcttgctaaaggtttcaattatcaccaaggacctgagtggctgtggcctattgggtattttcttcgtgcaaaattatatttttccagattgatgggcccggagactactgcaaagactatagttttggttaaaaatgttctttcccgacattatgttcatcttgagagatccccttggaaaggacttccagaactgaccaatgagaatgcccagtactgtcctttcagctgtgaaacacaagcctggtcaattgctactattcttgagacactttatgatttatagtttattacagatattaagtatgcaattactgtattataggatgcaaggtcatcatatgtaaatgctatatgcacaggctcaagttgttttaaaaatctcatttattataatattgatgctcaattaggtaagattgtaaaagcattgattttttttaatgtacagaggtagatttcaatttgaatcagaaagaaatatcattaccaatgaaatgtgtttgagttcagtaagaattattcaaatgcctagaaatccatagtttggaaaataaaaatcatgtcatcttctatttgtacagaaatgaaaataaaatatgaaaataatgaaagaaatgaaaagatagcttttaattgtggtatatataatcttcagtaacaatacatactgaatacgctgtggttcattaatattaacaccacgtactatagtattcttagaatacagtgctcactgcatttaataaatatttaataaatgatgaatgatagaagtttccatctacaatatatgttcctaaatggagcacagatgttcaaactatgctttcattttttcactgatatattaatttttgtgtaatgaatgccaacagtatattttatatgatttacttatgtgaggaaacatgcaaagcattaggaaatttatttcctaaaaacagttttgtaaaattagtattgagttctattgagtattataagatagcttacattttcaaaatggaaattgtcggtcatatttctagaactttaaagaaaaaagaatgttatattagttttctaaaactcaactatctttagtcatgttcaaaaatctattgctagatcatagtagatactggttttctattaactcaaaacctacattgacaagtttaacattgagaagaatcttaacaaaaatatggatatgaattcagtagatatcttaaattcaataaaatcactggaagtttttcatgataacttattttaagatgccttaaaaatcttaaagtcacaaaaggaaaaaggtttttaacatttacatgagttaacattttttcatagaacttatttcctagatagaattttttactgttttttactgttttcttaagaaaacagttaaatcattatgcattcagttggaagaaagtagtggcaagaattctttcattgctatataatattcagtggctcatttatacctaataaaataatggtattttaaaataatgctactttcaaagtagcatttttttagttagtttacaggttacatacccaaaaccttaactatgactaagaaattaaagaagaaaaccagcaaactaaaacttctgggcagcaaaaatatataaatgcttcagatgtcaaatacccatgcttgaaagctcgtgtaatttactttaagattatctgcctgctcttcttcaaagctgaccttgctttagaaatagttttaactagcttagttttctggtttccaaaactaaaatagattaaatcctacaaatttaaggacagttgtgacagtaatctgaccactatctataaatacattggacattggtttccaaatctccctttctcttcagttccttccttgttcaatatatacccttctctaaactgtgcgggtaaaaggaatgactgtccttgagagaaccattagtttatcaaaggtttatgtagttttgttgctgtaccctaactttgatattcagggaggtaggaaaggtaacagaaaaccagcatatttaatcaaagcaagaagtaatcgctgacagttaaatgtgaccaaaaaaattaaaagttcacaatttttttaatgtagccatttggggttatctctagtaaggcagatacccacgttggtaaatttttaggatattgtgttgcactagaaaactaagtggttcatatttctaatgaggaagattaatgaaagaacattgttatattctgcgtggtatattttaaagtttaagaaggcatgttaaacattatttcctctatggtagttaaaatacagaattagatttttaacaggtgtcatttgactaaacgtttcggtagaatgcttcatacttgagtgatgctggataaggtattgtatttcaacaatggactatgccttggtttttcactaatcaaaatcaaaattactctttaacatgataaatgaatttaccagtttagtatgctgtggtattttaataagttttcaaagataattgggaaaacatgagactggtcatattgatgaatattgtaacatgtgaattgtgatccatttctgatatgtcttgaactactgtgtctagtaggcaaatgtcattgttacctctgtgtgttaagaaaataaaaatattttctaaaggtcg

SEQ ID NO: 279 - DNA, 5293 bp, Homo sapiens
caagagcggaggaccaggaaccagagagagagagagagaaaagagagaggagagacagagcgcttgggggcgaaaggagagagggagggaagggtgggtaaggaggagagagcggtctgctgcaaaccccaggaggagagcttggagcccaagccagaactcgagccctagccggagccgttcacagggaggcggctgccgggaccgtcagccctgcatgatgcatctccggctcttctgcatcctgctcgccgcggtctcaggagccgagggctggggctactacggctgcgacgaggagctggtgggtcccctgtatgcacgctccctgggcgcctcctcctactacagtctccttactgcgccgcgattcgccaggctgcacggcataagcgggtggtcaccacggattggggatccgaatccctggctccagatagacttaatgaagaagcaccggatccgggccgtggccacacagggctcctttaattcttgggactgggtcacacgttacatgctactctacggcgaccgagtggacagctggacaccgttctaccagcgagggcacaactcgaccttctttggtaacgtgaacgagtcggcggtggtgcgccatgacctgcacttccacttcactgcgcgctacatccgcatcgtgcccctggcctggaacccacgcggcaagatcggcctgaggctcggcctctatggctgcccatacaaggccgacatactctatttcgacggcgacgatgccatctcctaccgcttcccgcgaggggtcagccgaagcctgtgggacgtgttcgccttcagcttcaagaccgaggagaaggacggtcttctgctgcacgccgagggcgcccagggcgactacgtgacgctcgagctggagggggcacacctgctgctgcacatgagcctgggcagcagccctatccagccaagaccaggtcacaccaccgtgagcgcaggcggagtcctcaatgaccagcactggcactatgtgcgggtggaccgatttggccgcgatgtaaatttcaccctggacggctatgtgcagcgctttattctcaatggagacttcgagaggctgaacctggacactgagatgttcatcggaggtctggtgggcgccgcgcggaagaacctggcctatcggcataacttccgcggctgcatagaaaacgtaatcttcaaccgcgtcaacatcgcagacctggccgtgcggcgccattcccggatcaccttcgagggtaaggtggcttttcgttgcctggacccggtaccgcaccctatcaacttcggaggccctcacaacttcgttcaagtgcccggtttcccacgccgtggccgcctggcagtctcatttcgcttccgcacctgggacctcaccgggcttctccttttctcccgtctgggggacgggctgggccacgtggagctgacgctcagcgaagggcaggtcaacgtgtccatcgcgcagagcggccgaaagaagcttcagttcgctgctgggtaccgactgaatgacggcttttggcacgaggtgaattttgtggcacaggaaaaccatgcagttatcagcattgatgatgtggaaggggcagaggtcagggtctcatacccgttgctgatccggacagggacctcatatttctttgggggttgtcccaagccagccagtcgatgggactgccactccaaccagacggcattccatggctgcatggagctgctcaaggtggatggtcaactggtcaacctgactctggtggagggccggcggcttggattctatgctgaggtcctctttgatacatgtggcatcactgataggtgcagccctaacatgtgtgagcatgatggacgctgctaccagtcttgggatgacttcatttgctactgcgaactgacgggctacaagggagagacctgccacacacctttgtataaggaatcctgtgaggcttatcggctcagtgggaaaacttctggaaacttcaccattgatcctgatggcagtggccccctgaagccatttgtagtgtactgtgatatccgagagaaccgagcgtggacagttgtgcggcatgacaggctgtggacaactcgagtgacaggttccagcatggagcggccattcctgggggctatccagtactggaatgcatcctgggaggaagtcagtgcccttgccaatgcttcccagcattgtgaacagtggatcgagttctcctgctacaattcccggctgctcaacactgcaggaggctacccctacagcttttggattggccgaaatgaggagcagcacttctactggggaggctcccagcctgggatccagcgctgtgcctgtggtctggaccggagctgtgtggaccctgccttgtactgcaactgtgacgctgaccagccccagtggagaactgacaagggactgctgacctttgtggaccatctgcctgtcactcaggtagtgataggggatacgaaccgctccacttctgaggcccagttcttcctgaggcctctgcgctgctatggcgatcgaaattcctggaacaccatttccttccacaccggggctgcactacgcttccccccaatccgtgccaaccacagcctggatgtctccttctacttcaggacctctgctccctcgggggtcttcctagagaatatggggggcccttactgccagtggcgccgaccttatgtgcgggtggaactcaacacatcccgggatgtggtcttcgcctttgatgtggggaatggggatgagaacctcacagtacactcagacgactttgagttcaatgatgacgagtggcacctggtccgggctgaaatcaacgtgaagcaggcccggctccgagtggatcaccggccctgggttctgcggcctatgccactgcagacctacatctggatggagtatgaccagcccctctatgtgggatctgcagagcttaagagacgcccctttgtgggttgcttgagggccatgcgtctgaacggagtgactctgaacctggagggccgtgccaatgcctctgagggtacctcacccaactgcacaggccactgtgcccaccctcggctcccctgtttccatggaggccgctgcgtggagcgctatagctactacacgtgtgactgtgacctcacggcttttgatgggccatactgcaaccacgatattggtggtttctttgagccgggcacctggatgcgctataacctacagtcagcgctgcgctctgcagccagggagttctcccacatgctgagccggccagtgccaggctatgagcctggctacatcccgggctatgatactccgggctatgtgcctggctaccatggccccgggtaccgcctgcccgactacccccggcctggtcggcctgtgcccggttaccgtgggcctgtctacaacgttacgggagaggaggtctccttcagcttcagcaccagctccgcccctgctgtcctgctctacgtcagttcctttgttcgtgactacatggctgtgctcatcaaggatgatgggacccttcagctgcgatatcagctgggcaccagtccctacgtgtaccagctaaccactcgaccagtgaccgatggccagccccatagcatcaatatcacccgtgtttaccggaacctcttcatccaggtggactacttcccactgacagagcagaagttctcgctgttggtggacagccagttggactcacccaaggccttgtatttagggcgtgtgatggagacaggagtcattgacccggagatccagcgctacaacaccccaggtttctcaggctgcctgtctggtgttcgattcaacaacgtggctcccctcaagacccacttccgaacccctcgacccatgactgctgagctagctgaggcccttcgagttcagggagaactgtccgaatctaattgcggagctatgccacgtcttgtttcagaggtgccacctgagcttgatccctggtatctgcccccagacttcccctactaccatgatgaaggatgggttgccatacttttaggctttttggtggcctttctgctgctggggctggtgggaatgttggtgctcttctatctgcaaaatcatcgctataagggctcctaccataccaatgagcccaaggctgcccacgagtaccatcctggcagcaaacctcccctacccacttcaggccctgcccaggtccccacccctacagcagctcccaaccaagctccagcctcagccccagccccagccccaactccagccccagcccctggcccccgggatcagaacctaccccagatcctggaggagtccaggtctgaatgagtcagaagggcttctgggaccaattccagctcctgacattcccccagtcctgcctctcccccatcctatcagggacatttggctcctcttagctggctctgctcatccagaggatattcccccatcccccccccatcaagtttggtgggcagagctacagatgggacccaagggagtggccgagcctcactgcctaaaccaatgcccttctcatccctgtttccccaggctcctggctgtttatctgccccaaaggagaagcctcatggggttgacataggtcctttctgccatctctgttccagctgctgtcagggattaacaacagagtgtaggggagattaactgcctcccttccaatagacactatcagcagggacagatgtgtgggagtgcagggctgcagagggtatggggggaggaggctgctaaaccctatcccccagcctcccccctgccctgaagatcttccatttgcttccactcagctggaggctcaagagggcttgatggctgtcccctgcccccctccttttgttttgtacacagagaccaagaggcctcagtttagcaccttagtacctccgctgcttcacttgctttagccaaagccataaaaaacctgcaacgtagagaaaataatgcagataccctgactagccagccctctactcctccaaccttttccaagatatgcaatggcctttgtgcctgcccaaaggcttcgcccctccagtgcatgaggaaccctctttcctccgctcagagatgctgcttcatttacccaggaggtcatattctttatatatattttttgttgcaaagtgtctctctagagaaactctatatattattcgaatttttaaattatttgtttatatataaaagaaaagctcaattggcaaaaaaaaaaaaaaaaaa

SEQ ID NO: 280 - DNA, 1991 bp, Homo sapiens
cacgcgtccggctagaaacattcttgtggagatctcctgtccacacctccaagaatccctctaagtaaacacctagaagtaaaattgctttacacaataccactgtttgcagagtgctttacaaataaccactgtttccaaaagcaaatacactaattggcacacacacacagcagtacataagggttttgattgctccatatcagctgagcccttgatattgtcagacaacttggttttcctcagtttgatagatatgaaatgttatatcctatgcttttaatatgtacttcttatatatttttaggtgcttattcctcactcatgcttccaagaagtacctgttaacattttttgccatagttttaaaattttcattttgtcctttcctcatggatctataggaatgctttatgtattcaggattctaacattttgtccattatatattttacatatatctttgccaagctggtacttattgttttacttttattatgctatcttttttgatatacacgaattattaacaatatagtcaatttgatttttaacgtttacattggtcagtctttccctttatggtttacgctttttgtgtcttgttaaagacatctttccaggaacagcgtgaggaggacagaagcacccaacaggactgctcaagccacctgcgaacactgctgctaccatgcccaagagaaaggcaaaaggagatgctaaaggtgataaagcaaaggtgaaggatgagccacagaggagatcagctcggttgtctgctaaaccagctcctccaaaaccagagcccaggcctaaaaaggcctctgcaaagaagggagagaagcttcccaaagggagaaaggggaaagcagatgctggaaaggatggaaacaaccctgcaaaaaaccgagatgcctctacactccagtcccagaaagcggaaggcactggggatgccaagtgaaatgtacatttttgagagctctgtacttatagtgactctactgtttgaaatactatttttttaaatcaagttttataaaagtgtagaattttggcttttttaagttatgttgttagcacacaggacacttccttgttgtcttttgtggaaagggcaagtaccactaatagggtgtatctcagaaactgaattgaaataagggaaaataggattttctgtcctggtttttgaagattgttcttgattcccttgattcccaggagagattctctgacattcacgtgtcagccactttggcacggaagccttacagtgtggggaaccaaaacttcgtgtctcctctttccccgatgccatcagcatagacttgacttccttaaaccgagagttttgatgtggccttggcaaccctaaaatcagctgtgttaggtaacaaaactcaggctttctgttgatgacatcgagatggtgtcacttaaaagagccaagattcctgttttcagtttgtggattcatcctgctggttttactttagtccctccatgtcaaagtgggcctgagaaaagctcatacatgcctcatgtgaagtgtccaccctctctgaaaatctttcttgttcaaaacagcaacgacatatcttgttaacttttacggtgacttttggaggaggggagtttggaaattgtaaaatgttatagattgttgcctatttcctgctgaaagtaaatgtttttaaaaagtatcatataaagctgaatacaaattggtttggggggagatcctttcctacccaaagtcataaatatattctttactgccttgtggaaattttatagttttgcctttcacatttgtctttagtctgtcctgaactgatttttgtgaaaattatgagttagaaattcaacttaacatttttcatattcgaagtggttgtctctgcactatttactgaaaagttcatcctttccccagtgatttgtaacactgcctctttcataaattaaatttttgtgtaaaaaaaaaa

SEQ ID NO: 281 - DNA, 2207 bp, Homo sapiens
actgacggccggccggcttcccggaactggaaggttacattgattacccacctagtacaacatcttacgggaagagcatagtatttcctagaggaatatgaacataacaggaaggtatcattggctctgaattaaatttgaacttgtcccctgaatagctacaggttttggaagctgaatcaatgttatcagatgagttagaatccaaaccagagctcctggtacagtttgttcagaatacgtccatcccattgggacaggggcttgtagaatcagaagctaaagatattacttgcttgtccctccttcccgtgactgaagcctcagaatgcagtcggctaatgttaccagatgatactacaaatcattctaactcctccaaggaggtcccttcctcagctgttttgagaagccttcgggtgaatgtgggtccagacggagaggagacgagagctcagactgtacagaaatccccggagtttttgtccacttcagagtcttctagcttgttgcaagatctacagccaagtgatagcacttcttttattcttcttaacctaacaagagcaggtctgggctcttcagctgagcacttagtgtttgtacaggatgaggcagaagattcagggaatgatttcctctccagtgagagcacagacagtagcattccatggttcctccgggttcaggagttggcccatgacagtttgattgctgctactcgtgcacaactggcaaagaatgcaaaaaccagcagcaatggagaaaatgtccaccttggttctggtgatgggcagtcaaaagattctgggccccttcctcaagtggaaaagaagctcaagtgtacagttgaaggttgtgaccggacatttgtatggccagctcactttaaataccacctcaagactcatcgaaatgaccgctccttcatctgtcctgcagaaggttgtgggaaaagcttctatgtgctgcagaggctgaaggtgcacatgaggacccacaatggagagaagccctttatgtgccatgagtctggctgtggtaagcagtttactacagctggaaacctgaagaaccaccggcgcatccacacaggagagaaacctttcctttgtgaagcccaaggatgtggccgttcctttgctgagtattctagcctccgaaaacatctggtggttcactcaggagagaagcctcatcagtgccaagtctgtgggaagaccttctctcagagtggaagcaggaatgtgcatatgagaaagcatcacctgcagctgggagcagctgggagtcaagagcaggagcaaactgctgagccactaatgggcagtagtttgcttgaagaggcttcagtacccagtaaaaacctggtgtctatgaattcccagcccagccttggtggagagtccttgaacctaccaaataccaattctatcctgggagttgatgatgaggtgcttgctgaaggatccccacgttccctgtcttcagtgcctgatgtgacacatcacctggtgaccatgcagtcagggaggcaatcatatgaagtttctgtcttaactgcagtaaatccacaagagttactaaaccaaggagatttaactgaaagacggacatgagcgtgggtgctgactcctggaagagcaactctatctgatctcaaaatgcgtatactgggaacaggatgccttagcccacaacagaaccagaatgaatctttgaaggcacaagactctgcttttgccactcttcctctttcctggtatagaagatggatgtaggagagcttcttttctaactaccatctgatcagacaaggaatgaagcaatgactgtgggctgggaaactgtacctacctctcttcccactgcaaatttctgggatagaccaaaagtgaatttgattatgtgttggctgaagttcttcattctgactgttgaggggaggttttcctttgaagagttttcatcccagactcagctgtcttttcacatggatgaaataattcctgctaccaacaacagagcttcaccaggaagttgagttttcaagatgccttgttgctttgaagaagggagtgatgtcaattctcttgttacattctccctttagcaacctgagtaagagactctctgccactgggctgcaaaaaaataaattacttgaatctccccttgaaaaaaaaaaaaaaaaaaaaaaaaaaaaa

SEQ ID NO: 282 - DNA, 1909 bp, Homo sapiens
  misc_feature (1)...(1909): n=a,t,g or c
cggagacggcggagcgggccttgttggcgtccactgcgcggntgcaccctgccccatcctgccgggatcatggtctgcggcagcccgggagggatgctgctgctgcgggccgggctgcttgccctggctgctctctgcctgctccgggtgcccggggctcgggctgcagcctgtgagcccgtccgcatccccctgtgcaagtccctgccctggaacatgactaagatgcccaaccacctgcaccacagcactcaggacaacgccatcctggccatcgagcagttcgaaggtctgctgggcacccactgcagccccgatctgctcttcttcctctgtgccatgtacgcgcccatctgcaccattgacttccagcacgagcccatcaagccctgtaagtctgtgtgcgagcgggcccggcagggctgtgagcccatactcatcaagtaccgccactcgtggccggagaacctggcctgcgaggagctgccagtgtacgacaggggcgtgtgcatctctcccgaggccatcgttactgcggacggagctgattttcctatggattctagtaacggaaactgtagaggggcaagcagtgaacgctgtaaatgtaagcctattagagctacacagaagacctatttccggaacaattacaactatgtcattcgggctaaagttaaagagataaagactaagtgccatgatgtgactgcagtagtggaggtgaaggagattctaaagtcctctctggtaaacattccacgggacactgtcaacctctataccagctctggctgcctctgccctccacttaatgttaatgaggaatatatcatcatgggctatgaagatgaggaacgttccagattactcttggtggaaggctctatagctgagaagtggaaggatcgactcggtaaaaaagttaagcgctgggatatgaagcttcgtcatcttggactcagtaaaagtgattctagcaatagtgattccactcagagtcagaagtctggcaggaactcgaacccccggcaagcacgcaactaaatcccgaaatacaaaaagtaacacagtggacttcctattaagacttacttgcattgctggactagcaaaggaaaattgcactattgcacatcatattctattgtttactataaaaatcatgtgataactgattattacttctgtttctcttttggtttctgcttctctcttctctcaacccctttgtaatggtttgggggcagactcttaagtatattgtgagttttctatttcactaatcatgagaaaaactgttcttttgcaataataataaattaaacatgctgttaccagagcctctttgctggagtctccagatgttaatttactttctgcaccccaattgggaatgcaatattggatgaaaagagaggtttctggtattcacagaaagctagatatgccttaaaacatactctgccgatctaattacagccttatttttgtatgccttttgggcattctcctcatgcttagaaagttccaaatgtttataaaggtaaaatggcagtttgaagtcaaatgtcacataggcaaagcaatcaagcaccaggaagtgtttatgaggaaacaacacccaagatgaattatttttgagactgtcaggaagtaaaataaataggagcttaagaaagaacattttgcctgattgagaagcacaactgaaaccagtagccgctggggtgttaatggtagcattcttcttttggcaatacatttgatttgttcatgaatatattaatcagcattagagaaatgaattataactagacatctgctgttatcaccatagttttgtttaatttgcttccttttaaataaacccattggtgaaagtcccaaaaaaaaaaaaaaaaaaaaa

SEQ ID NO: 283 - DNA, 3574 bp, Homo sapiens
ttttggagagaacccccggcaggaccaaccccgcacccgccagcaccgcggcaatgtccagcaatagttttccttacaatgagcagtccggaggaggggaggcgacggagctgggtcaggaggcgacctcaaccatttccccctcgggggccttcggcctctttagcagcgatttgaagaagaatgaagatctaaagcaaatgttagagagcaacaaagattctgctaaactggatgctatgaagcggattgttgggatgattgcaaaagggaaaaatgcatctgaactgtttcctgctgttgtgaagaatgtggccagtaaaaatattgagatcaagaagttggtatatgtttacctggttcgatatgctgaagaacagcaggatcttgcactcctgtccataagcacttttcagcgagctctgaaggacccaaaccaactaattcgtgcaagcgctttgagagttctgtcaagtattagagtgccaattattgtacctatcatgatgcttgctattaaggaagcttctgctgacttatcaccatatgttaggaagaatgcagcccatgcaatacaaaaattatacagccttgatccagagcagaaggaaatgttaattgaagtaattgaaaaacttctgaaagataaaagcacattggtagctggcagtgttgtgatggcttttgaagaagtatgcccggacagaatagatctgattcataaaaattaccgcaagctatgtaacttactagtggatgttgaagagtgggggcaggttgtcataatccacatgctaactcgatatgctcggacacagtttgtcagcccttggaaagagggtgatgaattagaagacaatggaaagaatttctacgaatctgatgatgatcagaaggaaaagactgacaaaaagaagaagccgtatactatggatccagatcatagactcttaattagaaatacaaagcctttgcttcagagcaggaatgctgcggtggttatggcagttgctcagctgtattggcacatatcaccaaaatctgaagctggcataatttctaaatcactagtgcgtttacttcgtagcaacagggaggtgcagtatattgtcctacaaaatatagcaactatgtcaattcaaagaaaggggatgtttgaaccttatctgaagagtttctatgttaggtcaactgatccaactatgatcaagacactgaagcttgaaattttgacaaacttggcaaatgaagccaacatatcaactcttcttcgagaatttcagacctatgtgaaaagccaggataaacaatttgcagcagccactattcagactataggcagatgtgcaaccaacatcttggaagtcactgacacgtgcctcaatggcttggtctgtctgctgtccaacagggatgaaatagttgttgctgaaagtgtggttgttataaagaaattactgcaaatgcaacctgcacaacatggtgaaattattaaacatatggccaaactcctggacagtatcactgttcctgttgctagagcaagtattctttggctaattggagaaaactgtgaacgagttcctaaaattgcccctgatgttttgaggaagatggctaaaagcttcactagtgaagatgatctggtaaaactgcagatattaaatctgggagcaaaattgtatttaaccaactccaaacagacaaaattgcttacccagtacatattaaatctcggcaagtatgatcaaaactacgacatcagagaccgtacaagatttattaggcagcttattgttccgaatgaaaagagtggagctttaagtaaatatgccaaaaaaatattcctagcacaaaagcctgcaccactgcttgagtctccttttaaagatagagatcatttccagcttggcaccttatctcatactctcaacattaaagctactgggtacctggaattatctaattggccagaggtggcgcccgacccatcagttcgaaatgtagaagtaatagagttggcaaaagaatggaccccagcaggaaaagcaaagcaagagaattctgccaagaagttttattctgaatctgaggaagaggaggactcttctgatagtagcagtgacagtgagagtgaatctggaagtgaaagtggagaacaaggcgaaagtggggaggaaggagacagcaatgaggacagcagtgaggactcctccagtgagcaggacagtgagagtggacgggagtcaggcctagaaaacaaaagaacagccaagaggaactcaaaagccaaaggaaaaagtgattctgaagatggggagaaggaaaatgaaaaatctaaaacttcagattcttcaaatgacgaatctagttcaatagaagacagttcttccgattctgaatcagagtcagaacctgaaagtgaatctgaatccagaagagtcactaaggagaaagaaaaaacaaagcaagatagaactcctcttaccaaagatgtttcacttctagatctggatgattttaacccagtatccactccagttgcacttcccacaccagctctttctccaagtttgatggctgatcttgaaggtttacacttgtcaacttcctcttcagtcatcagtgtcagtactcctgcatttgtaccaacgaaaactcacgtgctgcttcatcgaatgagtggaaaaggactagctgcccattatttctttccaagacagccttgcatttttggtgataagatggtctctatacaaataacactgaataacactactgatcgaaagatagaaaatatccacataggggaaaaaaaacttcctataggcatgaaaatgcatgtttttaatccaatagactctcttgagcctgagggatccattacagtttcaatgggtattgacttttgtgattctactcagactgccagtttccagttgtgtaccaaggatgattgcttcaatgttaatattcagccacctgttggagaactgcttttacctgtggccatgtcagagaaagattttaagaaagagcaaggagtgctaacaggaatgaatgaaacttctgctgtaatcattgctgcaccacagaatttcactccctctgtgatctttcagaaggttgtaaatgtagccaatgtaggtgcagtcccttctggccaggataatatacacaggtttgcagctaaaactgtgcacagtgggtcattgatgctagtcacagtggaactgaaggaaggctctacagcccagcttatcataaacactgagaaaactgtgattggctctgttctgctgcgggaactgaagcctgtcctgtctcaggggtaacctgcttacatctggactttagaatctggcacacaacaaaagtgcctggcatccactactgctgcctttcatttataataatagcccttccatctggcagtgggggaagaatacactcttgacattcttgtctcctgctttagaatgctagtgtgtatctatcatgtatgcaatactttccccctttttgctttgctaaccaaagagcatatattttactgtcagttgtctcaactctt

SEQ ID NO: 284 - DNA, 149480 bp, Homo sapiens
aagcttgcatgggtagcatggacagttgacataaaacacagccttaaatcttattttagtcatttgtctgatctttaccacctccaaattgttggcagaagctattagagcaaatttaactgagttcaaatttcacttcctatattctacttattttctgaaaggaggatgaaagaaatgcaaaaacagaagattggagatgagagcagggttagtcacaaacccagttcatatcaagaaccaatgttgagattactgagatctgttgtaattttttaccattcccaatagtaataagaatttttttctcaagaattacttattaaaatatgggcagacatcagtgatagactggataaagaaaatgtggcacataatacacgatggaatactatgcagccataaaaaagaatgagataatgtcctttgcagggacatggatgaagctggaagtcattattctcagcaaactaatgtaggaacagaaaaccaaacagtgcatgttcttgccttataagtgggagttgaacagtgagaacacatggacacagggaggggaaaaacacacactggggtctgtctgtcggggttgggggaaggggaggaagagcattagaacaaatacctaatacatgtgggggcataaaacctagatgatgggttgataggtgcagcaaaccaccacggcacatgtatacctatgtaacaaacctgcacgttctgcacatgtaccccagaacttaaagtataataaaatttaaaaaataaaaaatatgggcagaatgtgtagcaattttctagcctcagctcctgcttattcacccttattataaattaatgcaggtaaccgttgcccacatcaatgctactgcaaagaatgccgctgatgataaactgcggcagagtctccgcagatttgcaaatacacacactgctccagccacagtggttcttgtgtcaagtaagtacagaaacatctgctaatttcagctaaactcactgtgtgggaaattatcatagaagccagcaacatgtgaaagtaaaatgtatccccaaagaggctgaagtacatgagacatgtttatggttattgttgagaactgtttagaaaaaaaattgggtctaggtggatttctgtatttcctccttggaacttgagttattgtgggaccaggtttattttttattttatttttttgtttatttattttgagatggagtttcgcttttgttgcccaggctggagtgcgatggcgcaatctcggctcactgcaacctccgcctcccaggttgaagtgattcttctgcctcagcctcccaagtagctaggattacaggcatgttccaccacgcccagctaattttgtatttttagtagagatgggggtttctccagttggtcaggctggtctcaaactcctgacctcaggtgatccaccctcctcggcctcccaaagtgctgggattacaggcgtgaaccaccacgcccggccgggaccaggtttattaaagaaaaatgtgatttttttttttttttttaccttgtgctcagtattaataatttttaaagtttaagttaattttcaaatttgagtctccccaacatatttgctcctttttaatactgaaagtaacatatgtgtcttggaattcttttggtaagattgtcttacattcttctgatgtgaaacgtgtttctttcctaagaaacgggggaagcaattttgaatatagtccagcctttcctttcttctcagtgggtgtcaatagagttgtctgtctttgtcaagtgtttctaatgtttggggatggggttggtctgtaccttttctttcagctgatgtcaattttgcattggaacttagtgacctgagacacaggcatggtttccacattattttggtccataaaaaccaggcctcagaagcactgctgcatcatgctaacgagctgatcagatttgaagagttcatttccgacttgccccccaggttaccactaaaaatgccagtaagtgggtttgcgttatttttgccattttccaatattacattgtggaggctgaaagacagcccataataagggggttgccaggcccagatggggctgttctttgtaagaggtgggttagattttgaagtaaggcttagaaaccttcggttcttctcacaaatatacagataattggtatgtatgaagtttgcttttatttatttcaaaatatcatatgaaattgacttgtagatttaccttcccaacttgccagtgtcttcaaagctagcagtgttttgtgtcaggtggatagaaataacggattaaaagtcatgattctttttgcttccaagtattatgggtagagaatatggcgagggttctcacatacttgtgtggttggcaccaaataagtggagtcaattgtgcatttttttcggtatttaatccttaagcttcagcgggcctctgagtctgtgctttctattgtgcattccctgtggtgcatggacacaattagcaggagtggttattgctccacctgtgtgtagcctgtttatgccatatactgggaggagggtgtgagcacatttccaggactagcatttctgatagacttgacttgggataagaatgtttattgcagtgctgggctgtgtttaagccgctggcgaatatgtgtgtaactctgaaagaattaatgataatggagaaggagccatggtgtgggtgatccaggagagtgggcaatcccatacgttaaatgaaagtcttcacatataatttaataactgagagttacagaagtacgttagacatgatctcatgcaaagtcttcatttaagggagaaagaaatcagctcttagaaaaagtaaacgtgtcattggtgattgcagcagttaagagagtgggccccgggtatcctgattccggcacttgcctgctagtcacctgtgtccccgatacccaacaagccccctgcggtctggcttaagttgaaactcatgctatggacagttgagagttgtggataccagaggcttacccagggagtaagcatatacaggccttaccttaatcttttgaggctctttcctaactcacctttgtcattatttgtttttagtcacttggctgtagttacatttcttcccttctgcttctgtttgacggtcacttttctaactttgaaggccttatgtaaatacggtgttttttcctgggaggtgaaggttgcagtgagctgagatcgcgccactgcactccagcctggtcgacagagcgagactctgtttcaaaaaaaaaaaaaaaagtaaatgtagtgttttaggtaagaacttgcccactttggagattcttattccttatggttaaaaaaaccaaaacaatgttttgataattcaaaccatttagttttgctggatgttttttcccatccactagagtgataatttaagatacatttctttttatgttctttagtctgttcctttaattttaataaattaaacatacattggtactgcctgggttttgagtcccaggtgtaataggaaaagtgtagattttgttgataattggtcagtacccctcaaataaaaagaaaagcctctgattagaaaagtatggtgtgggccgagtgatgtggctcacgcctgcaatcccagtactttgggaagctgaggtgggcagatcaccaatcacctaaggtcaggagttcgagaccagcctggccgatgtggcgaaaccccatctctactaaaaatacaaaaattagccaggtgtggtggcgggcactggtagtcctagctgcttgggaggctgagacaggagaatcacttgaacctgaaagtggaggttgcagtaagccgagatcacaccactgcactccagcctgggtgacagagtagactgtgtctcaaaaaatctaaaaaaaaaagaaagaaaagaatagtatggtatgatcattgtaaaaacaaacaaaacacaatatttagaaatgtggaaagtgaaaaccccacaattctaccctccagaagtaaccactgttaatattttggtattgccctccagatttaaaaaatgtacgtttaaaaaaaaatgtgtcacatatacagtgttctgtggcttttggaaaaaaactatgtcagagcttggatgtcttttcatgttaatatatattaatataaatctgccacattttaaaaaccagaactttggtttgaaaagtacttgtatggctggtctttatttaaccagtctacctgttagtggacattttgtttatacccagttttgtgttttgttttgttttttaccatttccagcaaggtaatttatatctttaggctcctgggctgacataccatagggtaatttccaaggcataagagttctgggttagaactttactagcaagatccatgtcttcctccaggaaggtggtactaatttacactcataagagtgtctgttttaaatgtttgccaggccagtaagtgaaaaacagcatcatcttataattgacttttaatctttaacacagtgcaaaatatccttttatgattatcgttgtttgctttttatttcttctgtaaattgttcacatcctttgcctgttgttagtgatttctcttatggtttctggatttaaccctttatataattatcttaagttttctcctggtgctttaatggttctgctttttaaaatattattcttatttaaaaaaaatttttttgagactctgtcacccaggctagagtgcagtggcgtgatctccgcttactgcagactccacctgccgggttcaattgattctccttcctcagcctcccgagtagctgggattacaggcgcccgccaccacgcctggctaattttgtatttttagtagagagggggtttcactgtgttggccaggcttgcctcgaacttctgacctcaggtgatcacccgctttggcctcgcaaagtgctgggattacaggcgtgagccaccgtgcccagcctctggctagttttttgtagacgaggtttcaccatgttggccaggctggtcttgaactcctgacctcaagtgatccacctgccccagcatccctaagtactgggattagaggagtgagccacaatgcctggcaatttttaaaaatttttaatagagatggggtctcactgtgttgctcaggctggttttgaactcctgggctcaagtgatccccccgcctcggcctcccaaagtgctgggattacaggcatgagccaccatgcctggccagttcgttcgttcgttcgtttgttcgttctttctctctctctctctcttttctttctttttctccagttctacttccttctttctttctttcttttttttttttttttcacagaatctcgctctgtcgcccaggctggagtacagtggtgccatctcagctcactgcaacctccgcctcctgggttcaggcaaattattctgcctcagcctctggagtagctgggattacaggcgtctgccactttgctcagctaactttttttgtatttttagtagagatggggtttcaccatgttggtcaggctggtcgccaactcttgacctcaggtgatccacctgccttggcctcccagagtgttgcgatgacaggcgtgagccactgtgccaggccaagttctacttcttaatacataaatttcaacttatctggaagaattatgactacccactgccaaataaaacttccagcctaactactggcaatctgctgttgaagctgaacaggctctaaattgttgggttttaaaaaaatttttgtttacttaagcctatagctcctagtattcccaggcattctcctatgcaaaaaccaaccaggactgaccctgctcaccttctggctctataagttattattcagcagacctgcagaataaatagacttttaaaaaacaacttcgttgagatatgatttacatattacaaaattcagctcttttaagtgtacaataatttttagtaaattgagttgtacaattttagaatatttttgtcacctcagtaaatctattatgctaatttataattaatccccttccccactcccaggcactactaatctttctgtctctgtagatttgtattttctggatgctttatagaaatggaatcatatagtatacagacctctgtgcctagcatattcttttttatttttattttttgagacagtgtctcactctgtcactcagagtggagtgcagtggcacagtcactccagcctcaatcttcctgggctcaggtaatcctcccacctgagtagctgggactgtaggcatgcaccaccatgcccagctaaagcatattctttaaaacaatattcagttactttgtcaacactaaataatttaccctctcccatctaaatcactgtcatcttctcttcaaagttgttaactgaagtttggaggtcacccattgttcttattttgaaattgaatgtgtgcccttgaattaacctgacgtaacacttctttcctctgtattagcagtgccacactctgctctatgtttataacctaccagcaaataaggatggcaagagcgtcagcaacaggctcagacgcctgtccgataattgtggtgggaaagtgctgagtatcacaggctgcagtgcaattctccgcttcataaaccaagatagtgcagagcgcgctcagaagcgaatggaaaacgaagatgtctttggtaataggatcattgtgtcatttactccaaaaaatagagaactctgtgaaacaaagagttcaaatgcaattgctgataaagtgaagtctcccaaaaaacttaagaatccaaaattgtgcctcatcaaagatgcaagtgaacaatcttccagtgccaaagccacgcctggaaaagggtcacaggcaaattctggatctgctacaaaaaatacaaatgttaaaagtttacaggtaattttgatacctcttgctttctgaagtttatggtaggtttggtttgtttctgtgttttacgtgcccgcttgcttttggcgtgtccctttttgatttcagtgtttgatgatactcaaagtcaatcgttttctgtaaaggatctaacacatcttgggtacttaaaatttaaaccccactgtgcttgtgtctttgaaggagctgtgccgcatggagtcaaaaactggtcatagaaacagtgagcaccagcaaggtcacctgaggctggtcgtacccactcacggtaactcaagtgctgcagtgtcgacgccgaaaaactcgggggtggcagaacccgtttacaaaaccagtcagaagtatgtgaaactactctttctcatagctgcttcttgaatgtgaaggaagacatatgaccttttgccttcaattttccccttctgttagaaaggagaacctcagtgcccgaagtgttaccagttctcctgtagagaaaaaagataaagaggagactgtattccaagtgagttacccgtctgcttttagcaagttagttgcatccaggcaagtcagtcctctgctcgcatctcagtcttggtcttctaggtgagtccagcttcttgacccatgggggtggttacatgtaataggaaggattatgaaatagtatgtttgttgaaaagaattcagatagtactgaaatgcacaaagtaagtctcccatcactcttctgccagtccccctctcctcaggtaatcatcgttaacatttaggggcaatgctttcaccatttcttcttcctccatctggaaattgtggtaagcagaggtcagaaagagaagcctgttggagagtccctggccagtgcaggggggcatgtaaagatgtccctatgttcgctgtgttgaggaaaaagcccaaacgagccgtgcattggtggttctgattcatatggttctgtataggaagctatttggaagtaaagttttctgtaaaccatggtaattatttatcactgtctctcacaccaaggaattcttgatgcttgggagacagagaagccgtaaggccgtgttgcattcccatgagctccttttagcattgtgtttgttctgctgagttggtggcagatcactgtagaaagtgactatggatcagccgggcgtggtggctcacgcctgtaatcccagcactttgggaggccgaggcgggaggatcatgaggttaggagatcaagaccatcctggctaaccggctaacacggtgaaaccccatctctactaaaaatacaaaaaattagccgggcgtggtagtgagtgcctgcagtcccagttacttgggaggctgaggcaggagaatggcatgaacctgggaggtggaggttgcagtgagctcagatcgcatgactgcactccagcctgggtgacagagcgagactccgtctcaaaaaaaaaaaaaaaaaaagagaaagtgactatggatctataaaattacatctaaaaagccacataaaagttttccttatgtgcagaaagaactgtaacatgtaggcaagaacgtttaactctttcagagacacagaggaggttagacgccttaaattggtatcacaggctgatttcctaaggataatgcacaaagcagaaggttaattcatcaggactgcctctaattcctgcctttagctttaacccaaaggaagaatatatattaattggttggcggtaattaggggtcagtagatagtacttttgacaatgtctgaaatcaatgtgtatttaagattaaaaacacagctgggcacagtggctcacgcctgtaatcccagccctttgggaggctgaggcaggtggatcacttgaggtcaggagtttaagaccagcctggccaacatggtaaaaccccatctctaccaaaaataaaaaaaattagctgggtgtagtggtgcatgcctgtagtcccagctactggggaggctgagacaggagaattgcttgaatccaggaggtggaggttgcagtaagccgagatcgtgccattgcactccagcctgggtgacagagcgagactctgtctcaaaaaaaaaaaaaaaaaaaaaaagattaaaaacacatttgaaaaccaaatgtttggtttggttgtgttgtggaaaatctgcttctgtatatagtttcaaacaaagcctaaatgataaaatctaaatatacagaacagttttttaaaataatgtcaatatgtgtgttttaagcaggagtatgtctccaaaccttttaaacagagcatccccgcttgctttcaacattgcaaattcgagcagcgaagccgactgcccagacccatttgcaaatggtgctgatgtccaagtcagcaacatagactacagattatcccggaaggagctgcagcagctcctgcaggaagcatttgccaggcatggcaaggtaactttttccctcttgtgcttgctttgttatactctctgatggagtctctagtcaagaggacctaatttgatatacataaccacagccgggatagaagtgtgactgaacaagtttgaactccttccttttccctttggtctgctcagggtggtgctataaatccagtttttacaatgttagccccagagagcaagacgcctagcagtgaaaagctcttgtcttaggcagaaattgaaatggcaatttgtggccaggcatggcggctcatgcctgtaattccagcactttgggaggccaaggcggccagatcacctgaggtcaggagtttgagaccagcctggcgagtgaaaccccgtctctactaaaaaaaaattagccgggcgtggtggtgcacgcctgtagtcccagctccttaggaggctaaggcaggagaattgcttaaacacgggaggcagaggttgcagtaagctgagatgacgccactgctctctggcctgggagacagagtgagactccatctcagaaagaaaaaaaaaaaaaggcaatttgataagtaaaacattgatggatttcagttagctcttcctgctgaaatacaggtaggattctaaaataatgttggctggtcttgtttatgccttattatatttgactcattttttaggtgcaattttgctaaaaatgcacctttttagtagattcttaaaaatggccatgtcctgggttttgtagagtctagaaaagaccccaaacactcttcccatgtgttggcctctgagcctgccttggaaacctgtgtgtgccagagcacacaggcaggccgggccagtgtcacatctctaaaggtcaccctatcctcactttcttacgtcctggtcagcagaagagcagagttcagacatactccttcatggaagcgctgcagtcgacaaatgtgttccttcatggttcaccttcagttttaagacgacagggttctgggcggacatagcgtttagttttcgcttttcctgttgtaggtgaagagtgttgagctcagcccccatacagattatcaactcaaggctgttgtgcaaatggaaaacttacaagatgcgatcggtgcagtgaatagcctccacagatacaaaattggcagcaaaaagatcctggtctcacttgccaccggggctgccagcaaatcactctctttactgaggtaagaaacaagcaagctgtttatttcaggaaataacatttgacccagaaacaattttagaaataataaaaatagattcaatcacattcccacccccttgtgatgattgcatgtggaataatgcttattctagattgatacagttagaaacaagccatttgactcttgtctaagtcattaatcaaagctggaatacagcttaaacttgacaggcacttgggagtaaaataatacgcaacatgttcaaataggttctaaaaatagtagacccctacaataaaagtttataagcctgaaaagtctaaaatattaccttgagatcttaggtagaaggtagatttgtgtgtaaagactagatctacaaatcttcaagctctccatttgcagatatatccttagtgtcaaatagatactcagccccataagtctaccttaagactatctcagtctcaagcgtctggtgatggttttattcatagtaaaatgtgatacttctttgggtctccctgtttcggggagactggcaaaacaggacccactcctgagtgtttccttggatgatcagagatcttttttctaacttgtacttcactattacttaaattacgagttacgggttttttttttgttgttgttctcagaataaaaatgatgcttattgaagaaaatttggaaagtttagaaacataaaagaagcaggggaaaaaaaaccatccacaggcctatggcccaaagccaattgcacttaacagtttggcatcttcttttagttttgtttggattttttccctttgagcgttttttggtgcctctggttttttaaaactgtagttgagattatgttgtattcagttgtgtatccttatctatgggaacgccaatcacatatatctaacaaactgcagtgtggcaggagatatttaagctcttctcccttttgctctgaattcatcatgcttttctgctccactggtgtggaaaaccctatgattgatactaattctactgtgtaacgtaatcttctttcattgccttgtccctaaaatcctttctttaaatttttctggaaaatacattctgacataccagaaatccgtaaatttattttgcatatgcactgggttaattttatgaactctgtttatataacttgtaatatggaggaaatggtctgttccctaatcaaacttctgttttacagtgcagaaacaatgtctgttcttcaggatgcccctgcctgttgcctgcctctgtttaaatttacagatatctatgaaaaaaagtaagttaggtatattttttctttatccagtcagtactgattggtggcttacatgcacaaaaccatggtaatgactcttgaggaacttcagcctggtagaggagaggagacagagacactggcattcagatttacatgtcaatgaatgtttagcagacagttttaaaacgtcttttatttttaacaaagttagacctttggtcctcagtgttgtgcttatttttcccctaattgactagctttagtttgttttttttgtttgtttgtttgttttttaatttttttggagacagagtctcgctctgttgccgaggctagagtgcagtggcacaatctcaactcactgcaacctctgcctcacaagttcaggtgattctcatgcctcagcctcccgagtagctgggactacaggcatgtgccaccaagccttgctaagttttcgtatttttagtagagacagggtttcgccatattagccaggctggtcttaaactcctgacctcaagtgatctgcccactttagcctcccaaagtgctaggattacaggtgtgagccactgcgcctggccaagttttagtatttattggatgaacatttttaagcactagactataagctccaggacagcagggactagctctgccataatactgtatcctaagcacccagcccatagtagatgcttagcagggactagtgagtacaagaccaaggcactgcagagaaggcagaactgggcaagacttaggtcttgtccttgaggagcttatgtctagcgggaagagaaaatgctcgtgaatccttatggacagtgaagaaaactgattggaaaggaggagaaaaagctttgagaacacagaggaagggaagaacaaggaacttggccattatcccacaggtaatagggagccactgaagtgctggaggaaggaggggaggggaaaggtgtggtgatgggaatcatgctgcaggaagactcttctcgtagcagtggtgtctgagagggcaggaacaggggagagaaggaggcagagagggaaagtagctacatcagtccaaattcagagcagatactgttgggacagaactcgatgttacagaaatgtcaaaatgtcaaatgtcattgaaactagagtgggtaactaattttttttattaaaaacaatttttattgagccagggtctcactctgtcacccagggtgtagtgcaggggcacgaccctaggtcattgcagcctcagactcctggactcagatgatcctcccatctcagccttttgagtagctgggaccacaggcatccgccatcctgcccagttaatattttttaatttttgtaatgagggggttttgctatgttgcccagggtggtcttgaactcctggcttcaagtgattctccctcctaggcctcccaaagtgctggaattacaggcacgggccaccacgtccagccagagtaactagttttatgtagcaagcaaggtaaaagggagaggtcattttgattctgagtgttttgccttgcatgactgggatgatggttgcacagttaaactggaaatagggaaataaagcatggcaaggaggtacagcaagtttttggtcttggttttggacattcaggttttaggggccattggagtagctgggtggagaggtcacatagtcttctgcacattgagggacttctttgggagagaagtaggctctggagatagggcagtcatttgcctttaagacgattgggacagactagagagcagataaggttgggagggggaaggagaaatagagggcaggaatggatggaatgccaccagggccagggatgtgggcgagcacccaggatgtgtgccaagagagcacatcaggaatggggggatccaaggccatgaggaaatgcatgaggtgtggggatgaggcagaggccgctgataacttttgagtcatcactacagagtcctgtggctaaaatccagtagggaaggggctgagagactcgggggtaacacagcagaagcagctcctgagcagctggatgtttccattacagggacagggtagagtacgagactgagaatgagagtacaagggagagtgtgtctctccgggaggtggaagaggaccaggggctggtttggtagatgggaatctgagcatatgtaggacactgggaagaaaacactggtcagacagtgagaagaccagggaacacttactgagcacttactatgagccaagttctgtccaggcctaaccacacttaatcctcacattgaccctgtgagataggcgctatcatcaccccattttacagatggaaaaagtgaggccccgattggtcgtggaacttgactaaggtcacacaggttgaagtggagtcaggatgtgaactcaaatctgccagcctccagggccagtgcctttaagttccaagtaagaaagatacaggtcaggaggagaactggggagtccagtgtcagagggtgtgtggatcatgcagttgaggcataggagagttgagagggtcacggaaagcacatatacttctgagaggggagaatggggatggtgagaagtaacacagagaattggaagtgaggggagctgcatcgagagaggtttccaactcaagagaatttggtgaggtcacttaaagaaactgggcaggggctgggggtggctttcaaatgaagtgagcattgtcatggtcggagccagagacgactcaggagtaccaagcatcactggtttgctagtgaatgaatttgtagtagaattattccagttttacctttgaagagatggaggaaccattcttggttattgttctttatttaaacaggatgcgtgtttctgtataatcaaagaaaaaccttctaagtcagcgtctctcttctcttgcttttaggtttggacacaagttgaatgtgtcagatctatataaattaacagacacggtcgcaatccgtgaacaaggaaacggacggctggtgtgtctcctacccagcagtcaggcccgccagagccccttggggtcttcccagtcacacgacggctcctccacgaattgcagcccaattatatttgaagagttagaatatcacgagcctgtctgcagacagcattgttccaataaggatttcaggtgtgccgttcgttttcctttagaagtaattcttttctataagattgtggaacatgttaggatgaccttgtgaacatcttagaccctgcggaatgtcagcttccaattgtgttctcttttcttcagcgaacatgaatttgatccagactcttacaagattccttttgtgattctttctttgaagacatttgcgccccaggttcacagtcttctccagacccacgagggcaccgtgcctttattgaggtgaaccatctcaaagcctttgtcgatataatgccctagttctgctttttataggaagcctgccctttctgcccacatctctttacaaataagtactctacaatgcttcatcctcatgtgtttagccttcagtcaaagtacagtcatgcaccacataacaaaattttggccaaccatggactgtatataggacagtggtcccataagattataatcacatattttcactagacctttcgatgattagatacacaaataccattgtgttatagttgctcacagtgtgtagtacagtaacaggctgtccagatgtgtagctcgggaaccatgggctgcaccagcctaggtgtgcagtgggccgcagcatctaggtttgcataagtgcacctgatgatgttctcaggtgacagaatcacccagcaacacattattgagtacatatccccatcatgaagcagcacgtgactgtttatctgaaatgggatccattcactcagtacttcaacaagaaaatgtgtgtttgcgctacattttagaaacgtaaacgtgaggagggcagattcttccacagaggggagatgtatcataagtgctgcagtcgaaatctccacaagtgttgagagtacacagcttcaaatatgcatacatttcaagacttgtgagagaaaagtattcttcagaagttcatttaatcactccatgagccacaacagtagacttaacacaaaggccaacacaggactcagtggcctgcacgtccctgctgatgtggaagcagacgcgtaactgacttggagcccagttgccctatttttaatccccctcctggaaaactacccagaaaatgccatcagaatgcatcagagaggccagtgcctcagtgcttgcctccctgggtccttaattttaaccttcaaacctggtggtgggcattcagacaaatgattaacacatacattaaaccaaagccttctgtttagcaagcgcctccttttctgttattttgatttaacctttcctttttttgttgttttttcctatttcagctttccagattgttacattgcagagtttggcgatctagaagtagtgcaagaaaaccaaggaggtgttcccttagaacacttcattacctgtgttccaggtgtaaacattgccactgctcagaatggcatcaaagtggttaaatggattcacaacaagcccccgcctcccaacactggtaggtgtcaggtattttgtcctggagctaccacctgtccactatgagaccagaggaggctattggcttttattttaaacagcagcacaatttgccaagtgtgaaaacaccatggatgtgtcctttgatcttttgaaaattcctaaaatgcttgaggggttggcgttactggactttgttttattttttatttatttattttttttgagacggagtcttgctctgtcgcctagctggagtgcagtggtgcgatctcggctcactgcaacctctgcctcccgggttcaagtgattctcctgcctcagcctcccgagtagctgggactacaggcaccagccaccacgcccagctaattttttgtatttttagtagagacagggtttcaccatattggccaggatggtcttgatctcttgacctcattatccacttgcctccgcctcccaaagtgctgggattacaggcctgagccacagcaaccggcctagactttgttttttagatagggccttgctgtgttgtccaggctgctcttgaactcctgagctgaagatgtcgtcccactatggcctcccaaaatgctgggattacaggcatgagccaccacacctggccagtttgaaagtaccaacataagctatgtaaaaaatttgaaactcaaatttcacatttacagatccttttagcaacctaattttgtgaagcttttggcttgccagttgactgaccttttaaaaatagtttcaggggctgggcctgttggctcacacctgtaatcccagcactctgggaagctgaggtgggtaaatcacctgaggtcaggagttcaagaccagcctggccaacatggtgaaaccccatctctactaaaaatagaaaaatcaggcatgatggtgggcacctgtaatcccagctactcgggaggctgaggcaagagaatcacttgaacccaggaggtagaggttgtggtgagctaagatcaagccattgcactccagcctgggtgacaagagtgaagctctgtctttttttttttgagacggagtcttgctctgttgcccaggctggagtgtagtggcacaatcttggctcactgcaagctccgcctcctgagttcacgccattcccctgcctcagtctcctgaggagctgggactacaggcgcccgccaccacgcccggctaatttttttttttttctgtatttttagtagagacgggtttcaccttgttagccaggatggtcttgatctcctgacctcatgatccgcccgcctcagcctcccaaagtgctgggattacaggtgtgagccaccgcgcccaggattttttttttttttttttttttgagacggagtcaccctctgtcaccaggctggagtgcagtggccggatctcagctcactgcaagtccgcctcctcggttcataccattctcctgcctcagcctcccgagtagctgggactacagacgcctgccaccacgcccggctattttttttgtatttttagtagagacagggtttcaccgtgttagcaaggatggtctcgatctcctgacctcgtgatccgcccgcctcagcctcccaaaatgctgggattacagacgtgagccaccgcacctggccgaaactctgtctttaaaaaaaaaagtactttcaggtatttgaaggaaataccacttaatgcagatttaccttcgaaagtcattttggtccacgttttggactttgataaatgtgaaaataaatttaaaagaccaaggtatttggacctagacttgggtgagtgtctgagttacgggcatgtcctgagttgcagatatccaaggctgctgcccgtgaacgacactttacttgttgccttcctgtgtatacacacatacttcctcctctttgtccccaacacttttgcttctcccacctcccttaccctacaggaaaaaaggtgaggataaccaaggaattctttctgagtcagcctgctcttaggaatgtgtgtactcaggtttcttacgggacacctcctttcttttccctctgtcttagacttctcaggggccatagattatgccactcctcctttctcctaagccatgagcccacaagcctccactttttattttattttattttattttatttatttatttatttatttatttattgagacggaatctcgctctgtgtcccaggctggagtgcagtggtgcaatctaggctcactgcaagctccacctcctgggttcatgccattctccttcctcagcctcctgagtagctgggactacaggtgcctgccaccacgcccggctaatttttttgtatttatttttgtatttttagtagagacggggtttcaccttgttagccaggatggtctcgatctcctgacctcgtgatccgcccgcctcagcctcccaaagtgctgggattacaggcatgagccgccgcgaccagcaagcctctccacctttctataaagatttccgtttgattacttatacctttttaataggtataagcagtcaagatggtgcaaaaacctgttccttacacccttttatgtcatgctaatcttacaacattatcactttctgtggttttctgggtaacgttttcagctccactatggattaattttgctcttctgggccacctacctgatgaccatttataactttgtggaaaggtacgttccacatgaccaagtttcagaaggatcttggaaatataactagtttctaaactgggagcttcttgtgtactttgacttctgctataaataacactatagtagactctgctttaccttggccgcttaactttgaggattagtgggacagcatttgacagcccgtgaataagttagttagctagttattggactatgagacctgaatatagaaactgagacgtaaagcagctactgtatttggttttgtttgcttccccatgatcgaactcaagccagggactgcagggccattttcccttctttcagctggtgaaatctgtgctttctgtcttatacacgttctttttcttctagacccttggcttctgcgttcgaagagtcctgtaggtaacccccagctgatccagttcagtagagaagtgattgacttgctgaaaagccagccatcttgtgtcatacccatcagtcatttcatcccatcctatcaccatcattttgcaaagcagtgccgagtgtcagactacggatactccaagctgattgagttattagaagcagtgcctcatgtattgcaggtaaggcgtgtcacgggattacttgtttacaggcaggaatgttcctccatggctttggctgcctccatcaaagaaacagtttaattcctaagaagtcagttctgggcagaacatccactaaaaactttcttcagagggcaggaataacacacacaggcggcttctcaatttttcagaacgctgctagtttccagttttagaggaactccttggaggactgaggagtattttccctctaagctctatagaccttcttcatcccagcacagctttctccagaactgttcatgattacaaggaagctcccatgaatagccacatacttgtatgttggtgcctatgtgagagtcaagggcttaacctttcttctaaatttaactagttggagacaagttactgggctagagtgtagcactggatcctatgaagacttttaccagttaactcacagtgttataacagcttcccactcactaaaaacggcttgaaaaacttgtagaccaatttgtctggacaaccaatacagttttcatttctgtactcacgacttttcttttcaaaagattacacttttcatttttatactcaacgactgtttgggagaaggtgtgccaggccaaaaacgataagagtttcagaaggccttggacatttgttccttttgaccaactacattttgttgatcgacatgtgtttcaaattgcacacattctacataaagggagtcatgctctgaggctagtaacgagagggtgagccagcagcaaggaagtcgctgtctgctgaggtcttatgtgtataaataaactatttgctttgcagattcttggaatgggctccaaacgtctgctgacccttacccacagggcccaggtgaagcgctttactcaggatttactaaaacttctcaaatcccaggccagcaaacaggtcattgtgagagaattctcacaggcttatcactggtgagttgatgaaaagaacagaaatgaaagtaaatattttaggacattttatcttctgccaaactctaaatagttatctagtatttctattaagcattcttttggaaaacttgtagtagttttttgtttttttttttttttttttgagacggagtctcgctctgtcgcccagtggcacgatcttggctcactgcaagctccgcctcccgggtttatgccgttgtcctgcctcagcctccagagtagctgggactacaggcgcccgccaccacacccggcttattttttctattttttagtagagacggggtttcaccatgttagccaggatggtcgcgatctcttgacctcgtgatccgtccacctcggcctcccaaagtgctgggattacaggcgtgagccccagcgcccggccggaaaacttgtagttcttctaccgatgatactactcattccgtatccacttccgttgttaaaacctaggtgtttctcaaaggactgggatgtcactgaatatggtgtttgtgagttgattgacatcgtatcagagattccagacacaaccatctgcttgtcccaacaagataatgaaatggtgatttgtatccccaaaagaggtatgtgacttaacatttgctggaaggatattgtctatctcctgttattttaacatagtgtggcatggaagatgtggttttccctccctgtccgtgcttcctgaagattccacagaaagcacagtgtgaaaactgctgctctttggattctgtgttcttcaaagtaggtgaagctgttctcaagaacaaaagcaggctggctttttagaattgactctaaggggaaaaaggggcatcatcagcactttgctcaaatgccttctgcagcctggctgtggctacatgagccttagtcatccagttgagaatctgtcaccgtgcctgttggctttgctcttctgttgaactctgagctactttatttactgtgcacacttgagaagggaagacaactcgaatgtttttttttcttttgcctttcaaattttaatagttgaagtcagaactgcacaggtccagttacgggtagaaagtacagtatttgagggatgcgaaactcatggatactgggggccaatttttcgtgtctgcagtttccgcggggcagaccgcaagacttgagtaggtgcggattttggtatccaggcagggtcctggacccgatcccttgagaacaccaaggggtgactgtatggtcgtatcctccttctattatctggttcttaaacggtgctcctgcagaacattgatgtccatgaaatcatagaattccagggcccattctcacttaaaaattaatagaaacaatctcagcttaagctttccctcctgtttatttttgttcaacttttgaagcctgattctctcttctgctagcaagttttaactgaagatcagatgaataaacaaaaaaagtggggatattcagaagcgtgatttcatgggaataatttctagagtacttgcttaagtacagggacctgggtgtgtgtcatgttaatagatatggggcaggggctagaaaattgtttctagcttataagatgacattgtttctagcttataagatgaatatatatgaatttcataatataataatatcataacttcctggtgttctgccctggaacatgtttgagaaccacttgcaaagagggaagagtatatgtgtttgttttaggttgtgtgtgtttggaaggcaaggatgatatcgtttataaattcccaaaaggatttactctagtgtggatgttgaacacaaatgggtagaaaaaaactgtgattttatgttttttggtttttttaaaagaacgcactcaggatgaaatagaaaggacaaaacagttctccaaggatgtcgttgatttgctgcgtcaccaaccccatttccggatgccctttaataaatttatcccttcttaccatcaccactttggccggcagtgcaaacttgcgtactatgggtttaccaaactacttgaactttttgaagccatacctgatactttacaagtgagtgaagaaattctaattttataaagtatttttctgaacaacgtataggaaatactttttcacgttccagacctgtttttctgggaagtagggagttacgaaagaggatgaaaatctaagctattccagtcagagaagccatattcctgactcattagtatttttagataaatatggctttttccttcaataaaggattattcaaacttgttttgggggtaattattgaaaaaaagattcagtaggttttcttttttttgtttgtttgtttttgttttttgagacggagtttctttcttgtcgcccaggctggagtgcaatggcgcaatcttggctcactgcaacctccgcctgcgggttcaagcagttcacttgcctcaacctcccgagtagctggggattacaggtgcccgccaccatgcccagctaatttttctatttttagtagagatggtgtttcaccacgttggccaggctggtcttgagctcctgacctcagttgatccgcctgtctcagcctcccagagtgctgggattacaggcgtgagccaccacacctgctgatttcttacactgaatatttgttcattacttttatacttttaaaatccttcgtgttgaaggtaggtctgagtacatgaggtaacatcagtgctaagctgttcgctgttgctaagttaaaccaaatttctgttgttgattttattttctttttttactactgaagtgctttttaaaaattgttttattgtggcacaatacacataacatagaacttaccttcgtaactatctttatatctcctgtccagtagtggtcagcacattcacattgttatgcaaccgatcttctgaactttttcatcttacacaactgaaactttatacccattcagtaacgctgacttgttttttcattactagctgcatactttttttgctattctgtaaacacccgtgatttgtttattttccctttcctccccccgtgtgttttcaaaggtattggaatgtggagaagaaaagatccttactctgacagaggtggagcggttcaaagctctagctgcccagtttgttaaactccttcggtcccaaaaagataactgccttatgatgacagatctccttacagaatatgctaaaacttttggttatacatttcgtctccaagactatgatgtcagttccatttcggctttaactcagaaactctgccatgtcgtgaaggtaaatgtttttttttttttttttttttttccctcatgggataaaactcacagtgacctaattctcattaggacgtttgcgtgtgctgtagcgtttctttatttacaccttgaactacttaactgtcacagcattatgactcgttttgtgtcattagtgcttattaggtaatagaagccttggtttggaagttgagagttttggtcttcctcttgtgtgtttctgaatggccttgccaaagcaatgcctttgtgaactgatgaggtcactcttcaccccagggttcggtcatgaggtgcagctgcctcagcactgctggcctgagcttgactccttccagtgtgagttttgcctgtgacgttcttgggagcccgtaatcacacagtgtcctctccctccacattctcacccacttaggagtaggcttaggagcaagcgagggtgcagagtggcctttgtcactggcagagctgtagtagagagggcagctcgtgctgtttgctgtcctggactgcacttgacccttcctgtcctaggcagagcagctgccagttttcggcctcctcccccacaggaccagaagaagtcactgccaggaggaaggaatggaaagggaagcatgaaggacggcaccctcagttacaggcccattactagctgcacacatttctgtgtcatttaattccgtaaacagccagaacgggttcactctccctttccttcccactgtggggtttttttggagttggagtcttgctctgtggcccaggctagagtgcagtggtgcgatcttggctcactgcaacctccgcctcccaggttcaagagattcttcttcctcagcctcctgggtagctgggattacaggcgcccgccactacgcccagctagtttttgtatttttagtagagacagggcttcaccgtgttggccaggctgatctcgaactcctggcctcaggtaatccgcccacctcagcctcccagagtgctgggattacaggcatgagccactgcacccagcccccactgttttttaatgtattggactgcagctaagaagacgttcttaccttggcagaggtaggaacgctcagagctctccttaggtactgattggttggaggaggaggtgagagagcaggaagcacaaccaggagagccgaacatccctgagccaaggcagaggaatggccagcagcatcgcaggagggctggtcagagagggactgcctgacttccaggtttagctcagtgggaagagtcggtgctgctggccaggtcagtggcagtgttggttgtgtagacagaagccaccttggagtgtggtgaggagtgaggagaggtgagaaaatggcccaggtcatctggacagcatcctggtttgtctgcttgtgaagatggagggctgtggcagcagctagaggctgtggggctgagggagcaagggaggatttgggctgttggttttcctacctggaaaaacttgagcatgtctgaaagccattgatgtggatctgtctagagagagaagatgaacatacaagggcgagaaggggtaagacaggagggccttgaggtgtgggagactaggaaacagcacacagaggaaggaggaagtatacagggcaataggctgggggcaggcatgggcaggtctgatgtttatcatcaggaatagaagggagtcctcttccaagagtggttttccactagagagagggactgatctctgcttagagagagagaggagaggcagggctcaggacttaggagtggggagaaggtccacagttgtcatggtgagtggagagtggcttgatcaggatgtcacgtggagtgcaggggtatcgagagctcactgcaagttggcaccgtagactctgggagagcagcagttggggtgtggctatgcaggtgtcggttcagggaaagcaggtggttggattcaaggtgggagtttaccgatgggcgtcaggaaaaggcatgggatgagcgaatttaaatattgacaagaatgtcagtgccagcatgacaaaagaggagagtgaagcaagggagtgggctggcaaattgggagcagataggaggcagtgatgctgctgaggtttgagaaggggcggagttgagcgggtagagtctctttctgcactcccaccccaacagcagctccagacttgcttttgcaagtgggatgctcaggaggtttgaatgatttatgttggatggggtaatgacaggtttgcactgtgaccctggagatgggtgtctgcagtgaaattgaacacaggaggatgtcgtcggagatgacagaggcaaggcattgaaaggctatacggctgtggtgtgggacaggtccctgggtgttcagttgcccaggatgatgaaaggggtggactcaggtggataggaagaccccacgccatgacctagggctttgctgggtgagtgtgatgggtgggcagctggggtgtgagcagcaagaatggggagagctgagagaggctccgtggtgcctccctggctgcccactgggtctcctgggagcttctccaaccttacctttcagattcttatagaattagtcccagcacactctgagcattggtgtttttaaaagctccccaggcaattctaatgcatagccgggattgagaatcaagggatggatccaagtcgcaccagaggagcaggctctggtttggtttctttcctaagcagctgtagtgatggtgggggtctgggtggctaagatgactgggatcccctggacttgtatcggttggttgattaaacccgcttctgaggaggaaatctatacagtcccataatcatgataagtagggtgggaccctgccagcctccctcctgccttggctctgggcacatgtcagaaccagataaagatgccctggtcttgggatggctcctcaagtgccacccacctctctctgcctctcagaatccacggtccaaagagtgccaacttgtggtgacttagccctgccaagacctttggccctggcaggaaaaccagataaagggggcaaacaagctgtcaggatgagcattggtttgtgagagcagtgccggagccgtgtgtgtgccaaagctctgcctgtttttgtgccaggaaagctcacgccacagcctcaccctcgccacccacagcctgctggctcagtcaccagatgcgtgtttcttcacatggtgtttggtccccaagtgacaatctctgtcttttttgtaaggtttccctctcagcgcatttaaccgcttaaaccctttatctccttgagaatctgaaataattgaggagtggacagttactagtcagatgaaaataccagctttgtggtgagtaatagcagactagaaaaatgcagcttgccttgtaatcagagtaggccctctctcacctccccagcccgccctggggacgcatatgggcaagtcgggtctgcacagaagccatgtgagtgttgcttagagtctagcctccccatccctaccccccttcgagcacagcaacccacacttcacaagcttggaccactggccatcagctggccagtctgtgtccttcttatagtggggtttggaaagaatgaatgaaaaataaagagaatgatgcaatttcctcccccattattatcttgttgagagttttcagttatggaccggcagggggaggacagtttctgcttccatgttggtctggtgtcccaaagacgctaaaaacaaacccacttgctttatttcagtgtaagagaaaaaaattagagatttttcatctgttggtctcattaaccaaaatgaagtgagctgagttgggtataacctagggtgtctctcttgagctctgaaaagtgtgaattctcgttttccccaggttgccgatatagaatctggcagacagattcagctgatcaaccgaaagtctctgcgatctctcactgcccagttgctggtattgttgatgtcttgggaaggaaccacccatctttctgttgaggagctcaagagacattacgaaagtacccacaacactccccttaacccctgtgaatatggattcatgaccttgaccgaactgctgaagagcctgccatacttggttgaggtaggcacgttaatggctctttagaactatcattgaaaactatcgattgggcatttccggattacctgatggtctagattagagtgtgtagagctggaagggacccgagagaccatttcatggatgaacacgccgagacctcaggcagtgaagcagccctgcctaaatgggtggcagaagccagtgaaagcctggtctcctcatcctggcactggggtgtgtttgtcccgttctaggatgaaagcctggtctcctgatcctggctctggggtgtgtttgtcccattccaggatggatttcgctactgttttatctttctgaatgagatggtttatgtggtggcttgaagagagagatgagtaaggtgagggcagaaaggaaggttggccagccagtcccccaggcagcctttcaagaatggcgctccaagattgagagaatcttaagagaatactgcatgcaattctcgggcgacagatataaaaacctagagtaaataaatgaaatcctggaaaaaataagttaccaaaattcactcaagaagttaaaaattagaccaattaccataaaagagactataaaagatcactgaaatataccagtgaaaaaggcatcaggaccaagtgagataacaattgaatttcaaccaaccctaaaagaacagataaatctaccttttaaaaaaccattctggggcccggcaaggtggtacacgtctataatcccagctactaagaaggctgaggctagagaatcacttgagcccaggagtttgaggccagcctgggcaacatagcaagaacccatccccaagaaaaaaaatactgttctaggctgctgaaaaagaaaaaaggaaagcttaccatttatttttacgaagccaaaataaatttaataccaaaaacataagatagtcccttaaaatgatcctaaataagatattaacaaatgagctccagcaatttaaaagaatgatatgccattatcatctaactgtgggacacatcattaaataatgaaaggatatacatccagcattttctaaactctgttaatatctatcctaagaacaccagttctggacaggtgttaatgcatatttcaggacaaaggactttccctgtccagctaagattgggaatatcctttctcttggcgattccatagcatgttaaacactttgaaaaggtttgtggtaaagaaatctgcttccttaccctgcatacacaagggttttgtgtttgtttcttgttgcttttgatgtgtttttaaagaatgctagtgtcatcctcttatcacagtgtttcttggaaaactggtttggaggtgcagtttaatggccccagtgttcactgtgtgtaccgtgatttgccaacacagtttgcctcccccgatttcttccctactcacacactgtctcttcagaccgctgcagccttcgacttgcaaatagaactgaagtttgctggaggctatagccttctcttggaggaaatccttgaatatatccctcctccttttctttctcctcttccttctttccttcctcctcctcctttcttcttctttgtcttttttgtcatcttcatcttcttcatctttgtctttgtccaattcgtcgtcttcgtcttctttatcgtcgtcttcgtcttcttcatcgtcgtcttcgtcttgtcttcgtcttcttgttctttgtcttcatctttgtcgtctttatcttcgtttttgtctcgtcgtctttgtcttcatcttctttgttgttgtcttctttatctttgtcgtctccttcttcttcgtcatctttgtctccttcttcatcttcatcttctcatcttcgttgccttctttttcttctttgtcttcgtcttcaactctgggccttttccctcagtgggaggccttcactttccacggggcagggccagtcactaatatttctaatgctgcgttttctttttaaccaggttttcactaatgataagatggaagaatgtgtgaagctcacaagtctgtatttgtttgcaaagaatgtgcggtctttacttcatacttaccactaccagcagattttccttcatgagttttccatggcctataccaagtatgtcggagaaactctgcagcccaagacctacggccacagcagcgtggaggagctcttgggagcaattccacaggtgggcatttttctcagcttccgggagagcatcttctgaacagccacaggctaactgtcctgaacagaaaaataaaatgctgccagaataatggaacggcaggcattttgaattgatcctttcaaaacatactgttggtctaaagtaaatgattttagcatttctccttgattctttctgtaaacctttattaaatccctatatgccaggtgagtaagtttcaggctgtaactctagaaaggtgttggttaatgggagagtcaagacccccaagcaggcaactagtcagggcggtcagggcagtgggcgcgctgaggagggccgtgtcagggcccacttcccaagcctggggagcctgttgcaaaaccttcaaggatgtgcctgagggaagcacgtgacaaggaggggagagagcattctgggcaaaggggatgatgacatgagcagatgcagggttgtgacaagtggcatggagtgtcgagaggctaagagggagctgagagctcggttagggagggcgtggctcctccaggtaaggagggaggactgtgttggagagagctggagcccaggtttgcatttgaaaagcaccccagtggtgctgtccatggtagagccgagagaagcaggcatggagaagggaactgggctaggatcctggccactgcagaggtctgggtcagtgttagatggagggattgagccagagtaaaaatagtagaatagaggaagtaggaaggacccaggcaaagcttgcctgggagctgagatcagtgacctggcgacggtgtgcacatgtagggggcctgggagcctagctccactactaccactctgcttggctgagatggagagcggcaccatcagggagaggactttaagatgctgataatgaacttagtttaaagggtctgagagattgctcttaattcttttaggtggttgttcagtttctgcaaaaaaatggcaaagagctctcatgtgagaactaccttaatttatatgccaaagctggtgtttggaagacagtctttttaagaattataaaggatatttctgaaactgtgtctcatgatttttgaactactctgctttttataggggtatgtttctgtcagcttctgttgctttaaaagctaaggagagagtagagaaacatgcttcttggcagtaactcagctcctaaattctagcctaaggcaggctccgtaggtcacactcttcctgaatgttagggcttctgtcccctccttttccgctgcttaaccagtagtatgtcttgtgtgcaggtggtctggataaaaggacatggtcataagagaattgtagtgttaaaaaatgacatgaaaagtaagtaagcacccatcccctccccccttaaaaaatcacggttctctcactgacatttctctctgacgggtgctctttgtcctgtaggtcgtttgagttcactcagtctctcccctgccaatcatgaaaaccagccctcggagggcgagcgcatcctggaggtgcccgaatcgcacacagcctcggaactcaagcttggagctgacggcagtggtaagagaggaaaagcagagacataggagcttgtgaaattctaggagaaacggctttggggtcggggagagcgagggaaaggactccagcaagtcatccaatctgctgaagttacatagccacacatttttcaaagcagttttggtatttagttagtaacaggataaaattgacctttatctgttagcattgcatggttgactggttaaagtccctgaaggatgttggcacccccataatgatcatcttaccccagttcagatgttgaagaaaaaaattattccgacacttattataatggatattcatgacacttgcaacaggggagagagagccaactcccaatacatagcctaggagcagagtgagggctcagtgggtggaaaattactaagaggattcttgctataggcatgcaggccagccaaggatctagacatcagtggttgggaataaggaattcgatcagctgtgaagggtgaggggattctcactaaactgactcaagctaagactctagagcgagccggcaagttcagcaacagacatggaaggccaaggtcaggcctgatccggaagagggctcagggtgcctgactcatggctggtcaaggcgtctttgtcacaggacagccctaggcaggatttgatatactaatgcattaatattacccaaaattacactgagtcacatagatttcagatagatccacctctgtagtagatagaggccaattcttggaatgttatagcagttctaacttttctgaaggacttttgaattcatcgttataggtgagaattttgtcttcataacatgcggcgagatagcacgttaccgtcccctgtgcccttaggataactgagttacacagcatttgacgttttatgaagcgccctcctgggaatcatctgccgaagctgccccacagccttcagcagtgctgacctccgttgtgcagcggaggctcggaaatctcaggcagtcacgtattacagctcacccagagtcagcagctaggaagccacggaaccaggcccagggcttcggattctgagcttccacttgctgttaactacgtacaccccgtctcaggctgtcccttctctttggaagctgactgcaggacccttttctctggttgggtcttttgaggggccagtgttcctaagaacacggatcttcagaagaactagcttattaaggcgttccattaccaggatcttcctgttagtgggttttgggtttttgtttttttttttttttttttttaataccttaaatacttcttgactctcttatctttaaggcttagaaggaaaacttcaggtgtgagcccagggtgtgtgctgggggtgggcgtggaggtcctgtggtgtcacggccctccttgtttgcccagggcccagtcacacagagcaggagcttctccgcctgaccgacgactcccccgtcgacctcctgtgtgcgcctgtcccctcgtgcctgccgtcccctcagctgagaccagaccccgttatcctccaatctgctgatctcattcagtttgaggagcgccctcaagagccttctggtgggtgactccatgttgtcatggggattttcttcggggtttaaaacaaaaccacgatgagatactgatatagtaaatgacggaggtgggaagggactaccccttttcaggtggaaaacactgtgctgattattcgaccttctttccccacctgggttcctgcagaatgggatgcacagcctgaggttgcctggcgagcatcaggcaagggcgatttggcagctctggagggctggtggctcggggctgtgggcgagtccacaggggtgggtggggcctcctgggcttctgctctcccagactttgtgaaggttcagctgctctcaggcacacctgtcaccagatgtacacgtcacccatggtgggggtccagagggcccaagggctttataaaggggtgaatggagggaggtgtctgtggctggagccccggactctgcccagtgatataacagacaggaagctgagcacactgagtcccagcctagtgcaggcattggcactgaccctgtgctcagggctgacagacaccatcacatttaactcttaccacggctccaggtgagagccgtggaataaaggcagctgctttattccacaggctgcgtgactaaggcacagctggtgccgtcactagagaggcagtggccccgggctgctgggctagcaagggcagagccggcattggaacccaagccctcttgtcctgcggtgtctcctggcctctggagaggatggcccatctgccctgtacagatccctccctgctcttcatctgttggaacccaactcctccccactgctggtgctgctttccaggtcaccaggaacaacccgtggactcctggcttggcttttaccatcttggttgttcttggcagcgttcagcactgttgcccaggaaaagaactgaggctgttgacttggaaaataggagatggggaagtaactgcctgcggatagaaccagcctgtgcagtcagacctagaccatgccctgctcctgtgcagtgcccccctagggttggtggcacattgatgttagctcgtttgtggggttgtggcctttgtgccttcagtctgggcaagttcaactgcatgcaccggacaagagaggaaaataattaaaacactgtgggcagttctgtcagccgctcttctcttgagggtcagcctaggcagggagctggctctgctgtcccctctgccactctcaccttccatgggcctttgggagcaggagccctgtgccctatgcagtgggagtctaaggcataatgatgcatctctttcaagcagcgtggccctgtgtgtagagcaggtgaattacatgtggctcagccacagaaatggcagtccagaagcactgtgggaaagctggctgtgctcaacttcctgggttctgagggtaattctcactctgcgtagtccttccttatccccggtaatagacccatggggagcataggtcctctctaaatggagcaggccaggagctccctgacacccagatgctccgaccccaccccctaccacccacggcctcccgcctcaggaagtctctaagtcgtggatagctttatgggtccttaatatctggcaggcagaatgaatgggcagagaatccaaaatggaaaaacaaaaagttttaacctttgctcattcatttatagctcaaaatagagatctttccaactttgtaatccagtgggagaggtgggatgcagtttatagatacttgatttctgtgccaagttcactggccacacaactcatatgtaaactgtggcatagatgtagcatttagaagctttttattactattattatcttttgagaaaatatgagcaaggaagagaaaacccacacttcttacagttcctggatctgaatctgtttgcttttctgtgtttacagaaattatgattttaaaccaagaagaaaaaatggagattccaataccaggaaagagcaaaactctgacctctgactccagctcgtcctgcatctcagcagctgtccccgtgcctccctgcccctcctcggaaacctccgagtcactgctcagcaaggaccccgtggaaagcccggccaaaaagcaacccaaaaatagagtcaaattggcagccaacttttccttagcacctataaccaagctttaactcccatttggaatatagaattaggatgggaaaacactgtctgattctgcacacaaaagtgggtttcaaaaatacatccttttctgtgtcatgaaaaccccccgaagccattgacttcatcttacctgtgttctatcatgtttttcttttccattgaacacagctttgagctgaagtctttcttttcttcttcctttttctttcttttttcaattatttgaagaacttgtggcatttgttaaagaatccttaatatattttaccaaatttttagtaactattatgaaatacaatggtgttccaaaagaagaaagcactaaaaactcaactagcaggaagcggttttgcttccattgagccacgtcggtggtgtcatcctacatgtagcataatagagtctctcagcctttgcttactggtgtttccgacagtattaacccagtgcgtggcatgtctttgaagcaaagcctgtcccgctagcctgtgtgttcacacaccaaaggagaagggtaggcgaggggttcggagtgtattttcaggttggaatgtgaaggttcctggcttccatgtgacttgtaagtgtgccttgttttttatttaaactatgtctgtagttgacaaaagtggcttcatcacaaatttttttaaacgtttctactttggggttccatttaggagctttctagaaagttgaggatgtttgaagcttcccttctgtgttccagtttgatatgggttaggttaaggaaaaggagatggtctcgatgtcatggatttaaagtcagcatttggattacaacacacattattgtgtgtcgagaggcagcattggaaagagcctgattttctaaaatatgcatcaagtgcataaattacaaatcagagctgagtggggaggtgcttcagcagcagcgggatcaatacgatttccactgggaagagacaggaattctacctacacataggaaggccaaggttgatccacttaaccttgttattgtaattttaaagctggtatcggtagctgggaagctttatgtgtgtgtatgtcagctcagcatcttttaatcgtgtctgattttactctcgttacttctcgctgttggaagcatctctgggtttcttgtggcgtctggtgtggaatggccttcctctctaggtgcctgaggtgtccgctgacgggtggcctctcacccccctctagagaaacctgacatttacaatggattgtatttgtccggcaaaaaaggcggattcattcatagagcagaaagaacctgttggcgtaaggtcttccactagttagatggtttcttttggggaaatgtttatatttggtaacttctagaaagccagaaaatggactctgatttcatagcattttgataaaatgccacaaaataagggctatagagagatttttacaagtcagattttttgttccccaaatcttttaaatgaagccagtgactcccagttctcaacacatggccccagtcaagacagaacaccatggaaaaaaccctgtaagtattatggcactctccgaatcctcctgaaggcatttcctctacagacatagtgttacaggaagtgaaatgcaaatgtgcaattttttttaaaggagcttttaaacaaagtaataataattggtgttgagaacatcagttgccttattctaagatttcataaggctgagtttgcacgcttggacttcagttctgctagcatgtaaagagtggtggactttaaaaccgtaagaggtatcattacaagtcacctggaacagactcaaagaacaggttctttgggcaacagacaaagaagaatcaagttctgtgctgtcccgtgagtgtgtctgagtaccattcactggagttgctgcttaggtctgggacgtgtgtgtgactcttaacaattgctgtctgaaaatgagagagaagacttcggaagcacattgtgttcataatgtactccacaatggccagtccaattgctatctatttttttatccagaggcttaattaaatgatgtggtaaaatgatgtttgagcattaagacaatgtaattctttatttctgggtggaaagatataccggattaaatttatctgtttaaaaaaatgacaaaagttatcaccaaaaccccctttcccatcttgcactgtttgttttggattgggtttgggggaaagagatgtttttcttagttgtctactttgtttgaacacttttgttgtggttcaagtgctgttttgtgtgttgggaccaaacagttgtcaataaactttacaagcgagcatctattttgagtttcccaagtgagtggttttgtctgtctgtctgtctgtggggaggaattacaaaccaatacagttctgccatctttcattttgggtctcctcaacttctctccccttctggaaatagaattgtgaggtggagagtaaatccgtctacatcttagaggccttttaaactcagcacacgccgaagcaggtggctggatggtgggcccttcgtcgtcaggatcctccaagttttccagcctttgttccagcttataattacatgtgggaaaatacagtaaccacaaaaaccttccagttagaaaactctattaattcctaggctctctcttcttgtgaaagaaactccagcgtgcccgctgtctcgtttttggtcactgctaagcatgctttttgaataagccaatttggaaaagagttattccacagatacagttgtgaagccctcccatcccctgagaccgccattaccccgtcacccctgccaccagcaccctctggcaagaatttaaaaggacccagaagagacttgagtaaattgcttcttgatgacatttttttcaagttcagcaatgttaaaagctgctaaagacctttccaaacatttcacgatggcaaatttgtgcagaaaaagttgagtagccatcgtgccccttttgagcggcgtcaggaggtcttgttaggtgtggactggggctggaacggtggctttgcatttatctttgtttgtttcccacctaggaaggtgattcagaggtgggggcctagaagacagctgtctgggggagagcagacctgtccgtagcagagggggctgcgctgattgaagaagatctgttccctctctgttccctttgccagaaggagcgttgcgctttgggattcaccttcactttctagctgcttccatgggcagagggtgagtcatggcgcagaagccctcagcggcctccacccacctgctgtccccattgctgggggggggggcggtgggcggcaaaacttcctcaattctcctagtgtccctggctgggccttaaactgacaaagacattaataggaaaaaagcaaacaaattttacttcataccagttttgcgagagtcttcataaggaaatgaagaccccagagaaatggctaagcctgagtggttttttgttttgttttttggttttttgagacagtctcactctgtcacccaggctggagtgcagtggcataatctcagctcactgcaacctccacctcccaggttcaagcgattgtcctgtctcagcctcccgagtagctgggattacatatgtgcaccatcacactggcaaatttttgtatttttagtagagatgaggtttcaccatgttggccaggctagttttgaactcctgagctcaagtgatcctctgggctcagcctcccaaagtgctggaattacaggcatgagccaccacgcctggctgagaacgcttttttttggggggggggggggcggggggaaaagggctagagagcttagaaggtgccaagccagagcaccaagagccagaactttccttagcaagatgaagagaagaatacacacgttccgggaaggaacgccttggaagtgggggagctgaggtgcagaggaagaaggcattgcagggtggaaggggccgttcttagagggaaatcctgctcagtggctgggctgctcagctcctcactccgcacgaggtggtgaaccaaccaggagcatccgcaggggagcagtaccagggccagcagggaacatattgggcctgcttggcaccgtctcttccatccgcctcaggcagctcatgtgatggcctccaaaggcttcccaggtgcagggcctgggcatgagggaacccccgctcctaccacccacctgcccccactgcagtttctggtatcagcaagtgcagacaaatccacactggggctgcagggtcgccgcccttggtatttcagcagccagagtctgatgcatcaagggcaggtgtggcaagaatcaggaaatacattttttttttttttgagacagagtctcactctatcgcccagactggggtgcagtggcacgatctcggctcactgcaacctcctaccgggttcaagcgattctcatgcctcagcctccgaacagctgggattacagatgctgccaccacacctggctaattttttttgagacggggttttgccatgttgctctggctcgtctcaaactcctggcctcaagtggttcacttgcctcggcctcccaaagtgcggggattacaggcgtaatataatatagatattatatatagatatagatatagatgtctctataatatctatatataaatagatatatctattatatataatagagatatatatctatatataatatatagatatctatatattatatatagatatatatctatatattatgtatagatataatatagtcacacagtcaaccatgcccggaacccccaagcccccactttttttttccgagatggagtctcactctgttgcccaggctggagtgcaatggtgcgatctcggctctttgcaacctccgcctcctggtttcaaccgattctcctgccttagccttccgggtagctgggattacaagcatgtgccaccacacttgctaatttttgtatttttagtagacatggggtttcaccctgttttttaaattctctaaaaggaagaggacactttttttgttgttgttgttgttgtgttgtgttgtgtgtgtgtgtgtgtgtgtgtgtgtgtgtgtgttttgagacaaagtcttgctgtgtctccagactggagtgcagtggcgcaatctcggctcactgcaacctctgcctcccaggttcaagcgattctcctgcctcagcctcccaagtagctgggaccacaggcgcccaccaccatgcccaggtaatttttttgtatttttagtacagatgggttttcaccatgttagccaggatggtctcaatctcctgatctcgtgatttgcccgcctcggcctcccaaagtgctgggattacaggcgtgagccaccgtgtccagccctgtttgcttttaaatgggagagacctgtttaaatccctccgatgggaagagaaagaacaattggggctacagtggtggggagggagggagatgaatgatgactctgtcactaacaacccctgggaccgtgggcagtggatttactgccacttcctcatctgtaaagtgagaagtgataacaggatctgactcactgtttcaagtgtttattctgcctccgcttgcaacctcttgcaacctccgcttgaaaagggtaatggatttactgctacttcctcatctgtaaagtgagaagtaataacaggatctgactcatcaggctgatgtgaggagggaaccagccagtgtgagcacattgctcaaggcatagagataagctacaataaatgttattcccattatcaacctcctccatggcttctaaaaggagcaagtctaggtgtgcaggaccccacagtctgcaaggtttcccagcttggaaggtggccctggtaatctggaagcgtctgtgacagcttaaataaattggattttttaatgttttctttttttaaaaaaatcagtaggaattacaggaacatacagtaggtgtacccagagcttagcggaagtaccagaggcaggattttgatgagggtttgatctcctctggttcgttggatctgtgagtgactgctgtataactggcctgaggtcagacctcgctgacccccccactcccctctcccctttttttttgagatggagtctcgctctgtcgcccaggctggagtgcagtggcacaatctctgctcaccgcaagctctgctcactgcaagytccgcctcccgggttcacgccattttcctgcctcagcctcctgagtagctgggactacaggcgtccaccaccacgcccggctaattttttgtatttgtagtagagatggggtttcaccgtgttagccaggatggtctcgatctcctgaactcgtgatccgcccgcctcggcctcccaaagtgctgggattacaggcttgagccaccacgcccggaccccccaagcccccccttttttttttccgagatggagtctcactctgttgcccaggctggagtgcaatggtgcgatctcggctctttgcaacctccgcctcctggtttcaaccgattctcctgccttagcctcccgagtagctgggattacaagcatgtgccaccacacttgctaatttttgtatttttagtagacatggggtttcaccatgttagccaagttggtcatgagctcctgacctcaagtgagcctcccacctcggcctcccaaagtgctgggattacaggcatgatccacagtgcccagccttgacccacattttttatggggaaaagagggcggtgggccctttgcagcctgagttttcactgcacgttggagcgggaggggtctgtggtgggtggaattgggtcctccccaaatgcatgtctacgtggagcctcagaatgtgaccttggttggaaagagggtttttgcagaagtaattaaggaaagggtccaaatgagatcatactgcattcgggtggccctcactccaatgactggtgtctttttaagatgagagggtgcacagaggcacatatacagcggaggcggccacgtggagacagaggtgaagactggagtggtgcagccagggaactgccaaggtgccaggagccaccaggagctgcaagaggcaaaagaagattcttccccacagagggagcagagcaccgcagacaggttgatttcaggcttctggcctttaggactgtgaaaggagacggttccactgttttaagtcacccagtagaaggtcattcattatggcatccccagtacacgaagagtctggcttcatgattggtctaggttggtgaaggaggacacggggtcctctgaggccattgtggtggcactgagtagcccaagggacccttttcagcatcagaatggtgggaagtggtgtgcagaccaaagccgcgaacacgcagagtgggaggactggggtctagcagcctgctgggagggcctgtccaaccaaagaccttttgatctacaaatttttttttttttttcgagacgaagtctcgctgtgtcacccaggctggagtgcagtggcgcaatctcagctcagtgtaacctctgcttcccatgttcaagagattctcctgcctcagcttcttgagtagctgggattacaggcacaagtcaccacacccagctaatttttgtattttttggtagagatggggtttctctgtattggccaggctggtcgcgaactcctggcctcaagtgatcagcctgcctctgcctcccgacgtgctgggattacagatgcgagccaccgcacccagccaatttacaaatattttgaaaatgctacttatgaatggcccaataattttacttctaggagtttatcttaaggaaaaaataaaaaattcagatgaaaccttatccccctagatgtttatcaagacactattttttttttccagggggtgcgatcttgctctgttgcccaggctggaatacagtggtgtgatcatggctcactgcagctggaacctcccaggctccagcaatcctcccacctcccaagtagctgggatcacaggcccgcgccaccgcatatgcccagctatttgtatttttagtagagacagggttttgccatgttgcccaggctggtctcgaactcctggactcaagcaatcctcccgcctcagcgcctggcccaagacactttttttgtttttttttgagatggagtcttgctctgtcacccaggctggagtgcaatggcacgatctcggctcaccgcaacgtctgcctcctgggttcaagtgattctcctgccttagcctcccaagtagctgggattacaggcacccattaccatgcctggctaatccaagacactatttataagaaaacctagaaccagtctacacatccaatagtgaggaaatgattagatgaattacagtacatccacaagatggattactaaacagacattggcatgatttatgaagagtgtttaatgtttacaaagagcttttaatgatgtggaagatggtggtataataagtaggaaaaaactggttataaatgataccacaatatgatgtcaacgatgaaaaaatgcacaaaaaaagacttttttaaaacgtcgaaacatcagagtggtctctagttggaggaataattttttttttttttaagacaaacttcttcatactttttgtacttttaaaatgatttactatgtacatggattacttccataatcaagaaaaaaagtaaaaacttttaaaatgctgtgaacgtggtttccatttttattttctctgatgggtgactgcacatcagcatcttgagttatgctaactacttaggctggtcacgacacacacacacatacagagaagtcacacaggctgtaccgggctggctgttgcaaatgtacatgaattacacgggttgaagttgtttggcagctagttaacatatgccacccaatgacgggacacaatctggtcacacgctgcctctcctgcctgttgctgttctttacaaaggtccgtgtgtcgggctggcaaagtggcatcctgctggcatctctgtggtggccccggaatggtggagtgcccaggtcagcatctactctgggtcccattctcaactgctctggccttgacatcagagcttccggttccctgctggctcttctgcacactggatccatgccagtccaggccccctccaggcacacacctgaggcagactgagagcacaatggacgctgtcctgatgtgaactgtgcccagacacaggatggggggaagcgggagatgtgaccacgacaccacacacaagctcgatctttacagatgggccctctgggactgctatatgggtggtgcccgagagacacgggggccatgtggagccctccagggcacagttgctgggagaggacagacgggaggggacctgtgcccatgtgcctagctctgagagcagagctaggagggtggatggggaacgtgtccgacatggtgctagattgttgagaagtcacgactacacacagctggggagcatgcccctctcccagttcattcacacggtgggttagatacagctagagagaagtggagatatgcttttttgagggaggacctttcctggtgtttggataaacagtgagacagactcctgggttcggcatgctctggggaggaccatgcgacggtgagagactccctactgctacactctgtacagggtggccaggcccgcctgccgtgcccatggcctctggtgacagtcacgggcttgccttcaaccccttctgccttggagagctcttgggccccggtgaaatgggggctataaagacaagagggtgggggggggtccccatggcccagggcaccccacgtgggggctacatgatgttgcactgggtggccccgcaacaatccttgatcagtgccagccccgtcttggccaccgtgggcttgctaggtgggggctctgctttcttctctgcccgggagcctgcagcaagatgtgggcacagggagagggggagaaaggaacagagagagagaggtgaggtgagcagagccctgaccatctgcagcccagccccactgcaacccctggccaggtcttgttccaggccttgttcaggtggtatggagagctgatgcacatttcatatgatcctcagctggtcctcattttatagtcctcattttatatggtcctcaatgctcagcttccaaccctaactttcagcccttctcctagtcagctgttatcatcattgtacctgccaagcctagcacagggcctgacatccaagaagtatttggtaaatagataaatgggaaattttgttcaagtcacttcaatctgagggctcatatttttcaatttttgaaaatgctcatacattgtcttttcagatacctccacctcccattctctgttttatctcctagaatgcctatcacatgtaagttggaccttctcactctatcctctcggttttataacttctctttcatatttctcatctctttttctctttgtgctgcattctgtgtaactttctcagggctgtcttccaatgtataaattctcccttcagctgtgtctctgtatttaatccattgagtttttactttattgataaaaaaaaatttcagaaggccagttttttgcatgtctacttattcttttttcatagcatcttactatttcattttgggttttattccttctcttagctctttgatcatttaaaagtacttagtttattttcctttttaaatagttctatatttttggttcttgggaggacattctctttggtgcatctactgattctcctcatggtgattcagttcttcatgggtttttcttttcttttcttttcttgagatggagtctcgctctgtcacccaggctggagtgcagtggtgtgatcttggctcactgcaacctccgcatcctgggttcaagcgattctcctgctcagcctcctgagtagctgggattacaggtgtgcgccaccatgcctggctaatttttgtacttttagcagagacaaggtttcaccatattggtcaggctggtctcgagctcctgacctcatgatctgcccaccttggcctcccaaagtgctgggattacagacataagccactgtgcccggccgggtttttcatttttattgagggctcatcttcaagggggttgcttttttctgtgagaatactgtataccatgggatccagaagaatccctactgagcagttttgcatttgctaaatctgctaggatcccagagatttcactggttttacaatagtttttatttttcaacttggaattccagtaccagatgagtagtgtaaagttggccccttgcatgtggtgcatgcttggtgttttgatttctcgccagaatcatttcttttttccacccataatccaatagagaaggcaagtttccttgctcctcctccatgctgctaagtggagtttttctaccttgcctttcatgaaagggtccactgaggatgctggccttcggcagtgatcacgtgccttgtggttataggagccagcagaagagatcattgcccttctctttccttactccctccaaccatctttcacaggatgttaatgaaaactgggtttgtagttttatagacagtggcagcttttggtttttgtcttcccagcaagatttcaagtccctcttcctctaacagctcatgtccctgtggctgcaggagtgggcatgttatacattcctggccaatcccagtacccccagcctcttggtgatggtaatggatctaagaggtgggaacataatcccagaagggcgggtgagaatatttccctgagacttatgtatttcgataccagggaaaagaacctgtggtattgcttcagagttgctaagctatggttctagggttctggtcccatggagaaggcctgtgttgtaggaaaaaatgatgcttacatgcaaagagaggcagagatgagaaaaagaagaaaaggaggggaggtaatagtgttcagtccttgaggctctagttcttgttgctctttctccaacaaattcctttttttgcttagaccagtttgaattgggcatccatttcttttctttctttcttttttttttttttgagatggagtcttgctgtgtcacccaggctggagtgtagtggtgtgatctcggctcactgcaagctccgcctccccagttcacgccattctcctgcctcagcttcccgagtagctgggaatacaggcgcccaccaccaagcccggctaattttttgtatttttagtagagacggggcttcaccgtgttagccaggatggtgtcgatctcctgacctgtgatccgcccgcctcggcctcccaaagtgctggcattacaggcgtgagccaccgcgcccagccaggcatccatttcttctaactgaaagaggcctcactaatacagcagttaaacacatttgagaaacgctgggtcaacaaagaaaagacagtttcttgacagcaggatccatcatcactttaatatcctaatggacactgggactctccaaatacagggtcaagtaaacagcatttctcaaacttatttcatataaaaccctctttgctctgaggatctgatgaggttaatattctgagacatatgcttctggcttctccagagattccagacctaagagaggccagagctccctgagcctcagtagctacccaattctttctatgaaatgcaccaaactttgcaattagggaggaacaactaccaggaccaggtacgtagtttgcagagttcaatccaatatgaaaatgtagggccccatgttccaaacgtattaacaatttctagacagcaacaggagaacattaaaccaagcatggcacccttctaggcatgaggccccaggcaactgcctacaggcccatgaggctggtcaggcatgaggccccaggcaactgcctgcaggcccgtgaggctggtcctgcctgctgtcatcccatgctgaaatctgatctctagatctgatctctagaaagcattttgttgcgccccttatggctcccagacttctctgaaatggcctttttttttttttttttttttgagacaaagtcttaccctgtcacccaggctggagtgcagtggcccaatctcagctcactgcaacccccacctcccgggttcaagcaattctcctgcctcagcctctcgagtagctgggatttcaggtgtgtgccaccgtgcccagctaatttttatatttttggtagatacggggtttcaccatgttgaccaggctggtctcgaactcctgacctcaggtgatccacccaccttggcctctcatagtgctgggattacaggcgtgatccactgtgggcctggcctgaaatatacttttctcttttgtgggggaggggaatgaataatgtatatactcactggctggagatttggttactttgtctagaggttttaacttgattctcaggaaatcagccatttccttgtcttcttcttgctccctgtgaaagtagatgggtaaaagaaaagaagatacacagcaagcaaggaaagcatcaaggaaccaatgaaataaaccaataggttaagcaacaggctttgtggatggggcatgtatgttgtcacgtgttatgcgtgtacagtatgtatatgttgtatctggtgaacctgctctgaaccagagacacatatcaatgatggggtaaatgcttacccagaggtaggtatgtgaccccagggcagaggcagggacattacaggaccctgctggggggtcagtgagtgaggcagcacctctcctgaccttgtattttgaagccaccctattcacctgtgctcccacaaagtatgaggcaggtctcagagagcgagtcaccccagctcttccaaggatcaccaagataaagtaggtgggtgcagacttgctgaactgccttgaagagacacggtctttctttgccacccaggctggagtgcaatggtgcaatcgtaactcaagaagccttgaactcctgggctcaagagatcctcccacctcagcctcccaagtagctgagactacaggagcactccaccactcctagttaattaaaaaaaaaaattgtagagataggggggtctcactatgttggggcagcttgtctgcctgcccaagactggcattgataatttcttctagatctggaagcagaaccggaggtaaggagaatataatatttgttgtagttttctgtattttttgttttgttttgtttttgagatggaatctcactctgtcacccaggctagagtgcattggtgcaatcttggctcactgcaacctctgcctcctgggttcaaatgattgtttcctgcctcagcctcccaagtagctgggattacaggcatgcaccaccacgcccggctaatttctgtagttttagtagagacggggtttcaccatgttgcccaggctggtcttgaactcctgacctcaggtgatccacccaccttggcctcccagaagcgctgggattacaggcgtcagccactgtacccgaccatagaatataatatttggataggagggaaaagttggtttctctcattaaccagaagtccattgcagcatgaagaagggcagtggaactgctagtcccaggacccttgaagaaaggtctctgagaacacagacaataaagagcaagttgccctctgggttggaagggcctttttccttgtgaaaggccctaaaagctttgctctggtgtaaggaaacaaaaatcaagaaccaacatgtacagctttccacattttcaacatttacaacatgtttttacactgcagctccagggctgtggttgtcgaggtcaaggcagcagatgcaaagagaagaccctgatacttagaaaagggcattggcgccactaaggggaagggaaaggggagaacaaagctgggaggttgggaggacagaggttgggagcaagtcagttcaggtggcagagtttcggtagaaactgatagcagaagtttcaagacattgccttcaggagtgacaggatgtgaaggaagctctgccatgtattatgggatgtgactcctccctggtcacttcctggaacaacattccctcaagaggcacagatttgaaattctcttatatacaaaatgaattctcaagccagaaggctggggttccttgggattcagtgtccagagactgtggatcaaggccatgcctgttaggcaaggctgtgagtcccaggagcagaagatgggttctggaaggaagcagaaggttgctgtcctgcagcccagtgatcgggtacccgcagtgcactcaccttaaccgctcgacctccgcatcgtccaccaggaagtctctcttctgcaccagtttgtggatcttctggattagctcatcctctctctgcttctgcagtttggttttttctttttctggaaagaagacatcaacaaggagacagatgagcattttgggaggctgaggtgggcggatcacttgaggtcaggagtttcagaccagcctggtcaacatggtgaaacaaccccatctctaccaaaaatacaaaaattagccaggcgtggtggcacacacctggaattccagctactcgggaggctgtcagccaccacctcgggaggcgggagaattgcttgaacctgggaggcggaggttgcagtgagctgagactgcgccactgcactccagcctgggcaacagaatgagacttcatttcaagaaagaaaaaaaaaacaaaaaattacagagagacagatgagagggtgaccactaaaagcacttgagctggccgggtgcggtggctcacacctgtaatcccagcactttgggaggccaaggtgggcggatcacgaggtcaggagatcgagaccatcctggctaacagggtggaaccccgtctctactaaatacaaaaaattcgccgggtgtggtggcgggtgcctgtagtcccagctactcgggaggctgaggcaggagaatgacatgaacccgggaggtggagcttgcagtgagctgagatcgcaccactgcactctagcctgggtgatagagcgagactctgtctcaaaaaaaaaaaaaaaagcacttgagctgagcggccaggattgattggagacctgactctgcccttccaccctctggatgaacttggagaagcaacttgacctcttcaagcttcagttttctcatctgtaaaatacacagtgaggcttaaaatgggagtaatgggctgggcatagtgcctgccacctgtaatcccagcactttgggagaccaaggcaggaggatcacttgaggccaggagttcaagaccagcctgggcaacatagtgagaccctcctatgtctacaaaaattttctctgtaaattagccacatgtgatggagtgttcctgtagtctcagctacttgggaggctgaggtgggtggatctcttgagcccaggagttctaggctgcagtgagttatgattgcaccattgcactccagcctgggtaacagagaaagaccctgtctcttaaaaaaaaaaaaaaaaattgagagggcagggtgagtgtggggagggagagcatcaggaaaaatagctaatgcatgctgggcttaatacctatgtgtcgggctgacaggtgcagcaagccaccatggcccacgtttacctatgtaataaacctgcacatcctgcatactaaattgcatacaattttgaaatgcagtagtgttagtaaatggcttagtggagtgcttggccttggctgagagccttcagtaaatggtcatgacaaagccagggtcttctgcaaaggcagggggtgaggagaggctcagataggggtgctgggagggaactagttgtttttttccctttggtgaaggtaaaccaatttatcagaagaaaatcatccatgccaatgacactaaccctgtcccaaacaccaagtgctaggatgccaaagagaaaaaataaaaaaaagagagagggctgaagatgaggtttgagaaaattaagaggcaaaaacttaaacccacttgggctctttctgctcaaatcccttcagaataaaaaatgtgggacagcttgtctgcctgcccacgactgacgttgatcattttttctggatctggaagcagaaccaggggtaaggagaacataatatttggataggacagaaagttggtttctctcattaaccaggagtccaccactgcacgaagaagggcaataggcttgccagccgctccccattcccagccattggtgcattggatgatggtgtcactgctcctgccgtggtaaatcttgtgggttgggtctgattccccaaatcactcgtcagcaccgcagagccgctccctgccctctccaagcacgcaccaacacccatcgactcaccaggacccctgctcactcaggagctcgtggtgtgactttactctccaaataaccattgacagcactctgacattcccaagtgccctccactgctctctagatcttagccagaatcacccaacaactggctgggcccccaacatctgcaaacctctgtctccaagccattcatccatgtgttctgtcactcaccaatagaggcattccccagcctcagctgcagcaactcccaggagaaaccacctactcacacaagtggcctgcgtcagctcacagacctatgactagcccaagtctccaagtcattggccaatgctgctcacgtgcgtgtgtgccacatacctttcccatcatcttccacttgcctacaggtgccacccactgaaatcctaacctccatggtcatagtattaagaaatgaggcctttgggaagtgagtagattatgaaggtagaaccctcatgaatggaattagtgcccttataaaagagacccaagggagcttgtttgccccttccaccacacaaaggcacagtgagaaggtaccatctataaggaacaggccgtcaccaggcactgtatctgccaacaccttgatcttgcacctcccagcctccagaactgtaataaatgttgtttacaagcccccggtctagagcaagccacagagactaaggcacccccaaagttcatgtgtgccctatttggaaatagttttccccagtttatatctcttctatttggaaatactctatttccaaagtaatttgtaagttgctttgcacatgtaattataatagttaagctaaaatgaggtcatacttattagcatggaccctaaacccaatgacttgtgtccttatgagaagaggaaagagacccaagcatggtggcctgaacctgtaatcccagctacttgggaggctgaagcaggaggatcacttaagcctgggagttctagaccagcctgggcaacacagccagaccctgtcttttagaaaaaaaaaaaaaaaaagaggagaagagaagacacacagacacacacagggtcacgtgaagatggaggcagagattgaagtggtgcaaccagaaggcaagcaatgccaagaattgtgtgtgttactgttagagtaggtagccaggcagccatgagcaagaaaggagaggggatttcccccccaaggaatgccaggcaaccatcaggtgatgtcaggcagttgttaaaattgtctctctaaaataataattggtcacagctggtgccagggaaaggccatctcccaacagacagaaaacacctgaagttatcagcggtttcccgatgagatctcaggagttgggcaactgggctcaagcatgcacattaagaggcaaaatggcggagtctaactggtatatgaccttcctctaggaacactcaactggtgagggaaaaacatctcaaataatcaggcccatgacttctgtaaatacactgtgtttgcagcctctcccaagcgctggcaggccactgcgcatgcgcacaacctgccctgagggaaaatgaagggaggagagacataaaaccctggaatatgccaacatataaaaccccggaacatgccaacatataaaaccccaaatcaaaggtcaagcggtgcacttggatctctcaaatcacccacttggccgtcttccaagtgtcctttactgcctttcattcctgctctaaaacttgttaataaacttttgctccttctctaaaacttgcctcggtctctcactctgccttatgcccgctggtggaattatttcctctgaggaggcaagtatcaagttgcttcagactcgtatggatttgctactgctaatgatacaggagtgaagaagaaattatttaggcagatagggtaaggaagtcctcggtaaggttttccttttaatgaaaagcaacccccaaatcattttcttttctaacaaggagcagccagtaaaatcgagctgtagacatagtcaagggagctggaagcttacacgggtgaatgctggcagctgtgcccataggaaaaggccacctggtctaggtatgttcaaaatggcggctccacgctcccttctctttgccagccatgtgtacagtaaggagaagacaacatggcgccgcccaagtggaaagttcatttgcatgataagattagggtggggtggccagccttcccatgcactatgcaaacgtcacacctgctccaaccaatctgtgggccctatgtaaatcagacaccacctcctcaagcttgtctataaaatttggtgcagtctgccacaggccggaattcccattcagggacttctcgagagagaccgagagagctgttcccttttctctttcttttgcctattaaacctccactcctaaactcactcctctgtatgtcagtgtctgtgtccttaatctgcttggagagagacaacgaaccttgggtatttaccccagtcaacaacactacttcactaacactaccagaagctaagaggcaaaggagtctcctctagagccttagcagggaacaaggccctgttgacacctcgattttggatgtctggcctccagaaccgaaagagaatacatccagaaccgagagagaatacatttctgttgcttaagccatccagtttgcaccaatttgttaggcagctctgggaaatgaatgtaatgccctagggcttcaggagactccactgtccttccagtaattgtttgttttgtgcttacataagcttggatgggtttctgtacctttcagccagactaatccttggagaattgtgaaatgagagaggggaacaggcctggcggttcctaaccgtccctgcttatcacaatcaggtgcaaagctttaaaaattgccaatgctcggctaggcgcggtggctcacacctgtaattccagcactttggtaggccgaggcgggcagatcacgagatcaggaggttgagaccatcctggctaacacagtgaaacccagtctctactaaaaatacaaaaacaaaatttgccgggcatggtggcgggcgcctgtagtcccagctactcaggaggctgaggcaggagaatcacttcacttgaaccccggaggcggagactgcagtgaacccagatctcgccactgcactccagcctgggtgacagagcaagactctgtctcaaaaaaaaaaaaaaaaaaattactaatgctgagatggatcaggtgaggcaggagaatatggtctggaggcagggaacctagggccaacttcctagaactaaatcaaaagaaaaaccccaactttccacacataagtaacaaaaggactggaggctactccctttgcaaaccctcctccttttctgtgtgtcacatgagaaattgaaagtatatctgattggtcgcagaaagcaactgcaaaagctttctgcgaccaatcagactaattgtgggccactacttcatttacatagggtgtacaccaagtagccaacgggaaacctctagagggtatttaaacctcagaaaattctgtattggggctcctgagcccctatgctcaggcacactcccaccctatggagtgtactttcattttcaataaatttctgcttttgttgcttcattctttcctcgcttattttgtttgtgtgtgcattttgtccaattctttgttcaaaacaccaagaacctggacaccttccaccagtaacacagggactcccttttggggtctgtgggagacccccaccccaagcatggaaataaaggaaaatcttgagttccctcaaaggaaattctaggcacctagctagccttgaaaagtcaataagcaacttatcagtaagaaggtaatagtagcctaaaacaatagccaaggaagttagaatctggagatgttttgttttctatagaaactgaagataaacatcttagcatatatgtctgagttgtttttcagaaacccaggaccctaccaaatggatccactggcatatagacgtcagataaaggaagactaaggactgaattctgaccatctttccttgttctaagtgtcttccagagaggcctggagggagtcacacccatgggccagggatgccattcttttctgctgacccccgatttttattatttttatttatttatttatttgaggcagagtcttgctttgtcgcccaggctggagtgcagtggcacaatcttggctcactgcaacccccctctcccgagttcaagcaattctcctgcctcagtctcccgagtagctggaagtacaggcaggcgccaccacacgcggctaatttttgtaattttagtagagacgggggtctcgccatgttggccaggctggtctccaactcttggcctcaagcaatctgcccacttcggcctcccagggtgctgggattatacgcgtgagccactgcacctggccttgacccccgatttttaaacaaagcttctcttccttaaccaattgcaaattagaaaatctttcaatctacctatgacctgtgagccccagcttcaacgtatgcagcccttttaggccaaaattgatatgtaatctcaatgtattgatttacaattttgcctgtaacttctgcttgactgaaatttacccctgcctttaaaaacctgcactgaaatcgccattgcaaaattataagagacagtgaaagagatctgacctaatcaactccatcttgcttctaacctccaagctgtccttgttcattactgggcataggctgaactaactatgggaggaacttactttatcatttaaaacaaagacgataacagccttttcccaaaacaaactcccttcttgcctgggaactagactgcatttgtaggtgatacggttaggctttgtgtcgccacccaaaactcatcttgaattataatccccatcatccccacgtgtcaaaggagagaccaggtggaggtgactgaatcacgcaggcagtttccccatgctgttctcgtgatagtgagcgagttcccatgagatctgatggttttataagggttgggcagttcctcctgcgttcattctccttcctgtcaccttgtgaagagagtgccttgcttctccttcaccttccaccatgattgtaagtttcctgaggcttccccagctatgccgaactgtgagtcaatgaaacctctttcctttatacccagtcttgggcagttcttgacagcagtgtgaaaatggacttaacaaattaaccagaagattaggaattatgatagtgagtgagttccatgagatctgatggttttataagggttgggcagttcctcctgcgttcattctccttcctgtcaccttgtgaagagagtgccttgcttctccttgaccttccaccatgattgtaagtttcctgaggcttccccagctatgccgaactgtgagtcaatgaaacctctttccgttatacccagtcttgggcagttcttgacagcagtgtgaaaatggacttaacaaattaagcacaagattaggaattatggtttaggaatcatgcagctggaggctacaagatgctgaccctccccagattactcctgaagataacaccactattgtaaaaaccaagatcaatgcttgaggtattttgcagaccgtgcacttgatgggtcagtgggtaccacccagataaagtggctcatctgaccttgtggccccaacccaggaactgactcagtgcaagaggacagcttcggctccctgtgatttcatctccgacccaaccaatcagcactccattctcactgcacccccacccccatccaccaaatcgtctttaaaaactctgatcctggaatgctcaggggcactgatttgaggaataataaaactccagtctccctcagccggctatgcatgaattactctttctctattgtaattccccagtcttgataagtcaggtttgtctaggcagagggcaaggtgaacctgttggacagaacattacctataagccattgaggaggtcaggcttgaagcattagctgcccagtcctcctggcttggagccttgcaaataaactgtttcctttttaccactgcaaaaactctggggagacagctggtcttactgtgccaggaaagcagaccctagttgtattagtccattttcacgctgctgataaaaacatacccgcaactgggtaatttataaagaaaaagaggtttaatggactcacagttccacgtggctggggaggcctcacaatcacggcagaaggcaaaaggcacgtcttacttggcagcaggcagcacagaaaatgagaatcaagcgaaaggggaaaccccttataaaaccatcagctctcatgagacttcttcactaccatgagaatagtatgggggaaactgtcccccatgattcaatcatctcctactgggtccctcccacaacacacggggattataggagctacaattcaagatgagatttgggtgggaacacagccaaaccatatcacaagttgagttctattacaatgccagagtccaaagccaacaatgccagatcaattgcattggggtttctagtgggtggagaatagactttggtacttttccctcattccttcgttgttttatgtttgacatttaactttttttggtaacagctttattgcaatatgattcacataccatgcagttcatctgttccaagtgtatttgcagagttgtgcaaccatcaccacaatccattttagaacattttaatcacccccagaagaaaccccatacccactagctgtcgctctctttcaactaggaaagtctattcactcgtttatccttagggcctacacagtgctgggcacctagtaaatgctcacgaaagctagaggattcagttctactgtcattgcgcacactacccttacaacaagactgtgtggaagactcctacaccttgcctttgttatttatgggatattcacaacaaccatgcggggggtagtattattggcctcattttcccaacaaggaattcaaggctcagagaaattaagtcgcgaactttcacgaagttcacctgcctgctaaggctgaattcaaacccagattgctgcactctaattactaaagtagtagttcttatgtgggagctgtaagctgcaaagtgtctgagaaggtctcaatcaatctggaggtttattttgccaaagtcgaggaggcacctgggaaaaagagacacaggcagcaataggatccccggcctgtgcttttttctgcagaggatcttaaggacttcaatatttaaaggggaaagagagggcaggaaggggaggattgcattctctggccctcagtgaatttgcattttacataggataaaggaaacgcggagtagaggaggaagtcaaatgtgcatttgtctccgggtgggcggagggacgatgatttatagtcttgtcttagtcccctacctgttaggataagctgttaatttacattgacagggtgagggaggcccctgggaagataggtggcctttctatcttgcagctatctgtttaggaaaaaaagaaaggcagttttggctgggtgtggtggctcacacctgtaatcctagcactttgggaggcttgaggtgggtggatcatgaggtcaggagatcgagaccatcctggctaacacggtgaaaccccacctctactaaaaatacaaaaaattagccgggcgtggtggcaggtgcctacaggctcccagctactcgggagactgaggctgaggcatgaacccgggaggcggaacttgctgtgagcagagatcgcgccactgcactccagcctgggggacagagcgagactccgtctcaaaaaaaaaaaaaaaagtaggtttttgtatgactcatagttcccaagcttaacttttccttttggtatagtgaattggggtcctgggactttattttcctttcatagggcaatgttgcacacccccctgacctcgcttggggtacattcagcaacatctgtacatctatagacatttttggttgtcactgtcagaagggtttgaactacagtgactccatcttgaataggggctgggtaaaataaggctgagacctactgggctgaatgcccaggaggttaggcattctaagtcacaagatgagataggaggtcggcacaagatacaggtcacaaagaccttcctgataaaacagcattagtaaagaaggctgccaaaacccaccaaagccaagatggcgatgaaagtgacctctggtcgtcctcactactcattatatgctaattataaggtattagcatgctaagaggtactcccatcagtgccatgacagtttacaaatgtcatggcaacatcaggaagttaccctacatggtctaaaaaggggaggaaccctcagttgtgggaattgcccacccctttcccagaaaactcatgaataatctaccccttgtttagcatataatcaagaaatagctataagtacaatcaatcgaggagcccaagctgctaccctgcctacagagtagccattcttttattcctttgctttcttaataaacttgctttcactttacggactcgccctaaattctttcttgctcttggtccaagaactttggggtctggatcaggatccctttcaggtaacatcaccattgaggggtagcggagaggtacgttgtgctaatggcctgtagtgggtagaggccagggatgaaactcaacatcccacaagacacaacacagagccccgtacccccaacaaaaaatgatcaaccccaaaggaagatactgacatttgtcaaccccaaatgtcaatagttgaaggttgggaaacgctgctttaaggctcatcatgctgcacttgtagctcagtaagaactgccacttatgggcacccactgtgtgctgggcccagtctctttctgctaacctgggggctccttgagagtggagaaccgttctctgttcatcactgcaagcccggctcctaggttcagagcttgctgcagaacagcctcttgggacatagttattgaactgacagcatggcaaaaacattcaagtcaagggtaatggtgggtgcttatctggcctatttgaaaacacctttgcaaaaatgataacagtgagaaaattaggacagtgaaagggatctgatctaaccaacccccatcttgcctttaacctccaagctgcccttaatcattcccaggtttaggccatgctagctttgggagacatttagtttatagtttaaatgattataaccttttccaccaactaaactgcctttgtaaagctaataaaaggcccccatgttagaaggatgggaggaggctgaattctgctaaggtgtagacataaatgactactgccattattccagaggtcacaagatttgcaacttccccaattactcctgcagataacatcactattgcagaatctaagatcagccttttgagatatctctttaggttttgcatttctgatgaatgatgatccacgtggacctgccacccagaagtggacttagcacccctgagaatcatttttcacacacctatgattgcatccccaaccaatcagcagcatccattctgatatagtttggatgtgtgtccccgcccaaatctcatattgaaatgtaatacccagtgttggaggcgtggcctgatgagaggtgattggatcatgatggaggtttctcatgatggtttagccccatcctccttggtactgtccttgtgatagtgagttctcatgagatttggtcttttaaaagtgtgtggcacctcccgcctcactctcttgctcctgctctgggcacgtgacatgtctgctcccttgtcttccgccatgattataagtttcctgaggccttccagcagctgagcagacaccagcatcatgcttctggtacagcctgcaggactgtgagccaattaaacttattttctttataaattactcagttctctctttcttttttttgagtcggagtctcgctctgtcacccaggctgaagtgcagtggtgagatctcacctcactgcaacctccacctcctgggttcaagcaattctcccacctcagcctcctgagtagctggaattacaggcacccgccaccacccctggctaattttcatatttttactagagatggggtttcaccatgtttgccaggctgttctcaaactcctgaactcaagtgatctgccctctcagcctcctaaactgctgggattacaggcgtgagccaccatgcctggcctgggactagcattttgataagggtaagccccacagagggcaactaacacagcctgatgggcaggggaaaattttttggagaagatgccaaataagtcaggcattattaactaccaaatctggggtgacttcaaagttagagtttgtacacacttcatctgttcccaagtaggataataatggtcataattgctaatatttactggactcttgaggccaaatatcaagctaagcacttagtttgcatcatctcatcgatttttatgatatttaatttaatttaattatatatttttttgagacagtgtctcgctgtgttgcccaggctggagtgcaatggcacaatctcagctcactgcaacctccacctcccaagctcaagtgattctcctgcctcagcctgccggttacctgggattacaggtgtgtgccaccacacctggctaatttttgtatttttagtagagatggggttttgccatgttggccaggctggcctcaaactcctgacctcaagtaagccacccatctcagcctcctaaagtgctgggattacaggcattagccaccgtgcccagcctctttaggatatttatactcaatgaattagaccctcttactattactagccaattttcagaggaggagaaattgagtctcagagaagtacagtgacttgtccaaggacaagaaggtgaccagaattcactaggacttgaacccaggtcttcctgactcgaagttgtgtttgacacatgcagtcagggagcactgcattgcaagaatgaggctctgtcttccagacccaggcgtacagatgggccaggctgggggcccccaagcacctgtttagcacaaggtgaagttgcaaatggttacctgggatggcgaccaagttctgcagctcctgcttcaagtccatgatgtccttgcagagctggatgtcatccatcctggggaaacaggacaccatcaacagcaggttacatcagcagagcattacgccctgagcatcacccggttaacacaaagaagctattaaaggtgggttatcttttgaagaggccatacatgctcattgtagaggttttccctcaaaaggaaaaagccaaacactgctcaattatcccaccacctagaaatgatcactgttttttgtttgtttgtttgtttgtgacagagtctcactctgttgcccaggctggagtgcagtggcatgatctcggctcaccgcaacctccaccttccgggttcaagcgattctcctgcctcagcctcccaagtaactgggattataggtgcctgccaccatgcccagctaactttttttgtatttttagtagtatttttagtagagacagggtttcaccatggtggccaggctggtcttaaactcctggcctcaagtgatctgcacacctcagcctcccaaagtgctgggattacaggcataagccgcggtgcctggccatcagtcactgttaataacacctcgatagagctccttccagtcttcatgtgcctgacttaggtttgcttatataagtgggttcatatggcatattcagtttcgtttttcagctaaagtttacgttttttaaacactgcagaaattcacaacatagaggaaagtctccctctgtccttcggagagaatcattgtcaacggtttagtatgtattcctctggattttttaaaaacatttttattttgaaaatgtttaattttttattttttatttttggagatagagtgtcgctctgttgcccaggatggagtgcagtggcgtgatcatagcttactgcagacttgaactcctgggctcaagggatcctcccacctctgcacaacccctcccaaccccagccccctacggagtagctgggactacaggctaatttttaaacagttttttgtagagagagggacctcgttatgttgcccggctggtcttggattcctggcttcaagcaatcctcccacctcagcctctcaaagtgctgggatataggtatgagccactgcacccagcctcctccagatttaaaaaaaaagcgtatgcttataatatcatatatgacaccattgttattgcacaaaaattttttgcaatttgcttttttcaatttaataatctttaatagtcttgatcatctttccatatcagtatatgcaaatctccacatatttagtggctgcatagtataccattatattgatatacagtcatctatttttattttttaaatttatttttatttttattttttttagacagtctcactgtatcacccaggctggagtgcagtggtgtgatcttggctcaccgcaacctctgcctcccaggttcaagtgattctctggcttcagcctccagagtagctagtagctgggattacaggcgtgagccactgcactcagctgattatacagtgatctatttaactataatttatttaactattcccctattcatagacatctgggttgtttcctaatacatttctaggatagattcatagaaatgcaattgctgggtctagtggcatgaacacttacattgtagtaggaatttccaaattgccctccggagagatcatgtgtgacattaccaacagtgtggccatgggggacagtgggtgctggctcctgtcatctcagtaattgggttgcttttgcaacctagttttgcattacacattataattttgcattacacattatggttttgtgtgtgtgctacaaaaattaactcatcttgctgtaaacaatatttgtaatggctgtctgcaatttcacaaatgagattcatcgggattgtgctaattacaccctcatcttgattactaaggctggcttttcaggtttgagcaattttggccactgcaggatgaacatcagttcctctaaggcttcttctccatgttggattatttggggtttagattctcagaagtggaatcactgtgtacaaagggcttgatatttccatagctgttgagatgtatcttcaaataacttccccgtgatacacaggttcacattcactctgcgtgtctttgtctttgttgttcttgttttgttttttgagacagggtcctgctgtatcacccaaggcacagtcatagctcattgcagccctgaactcctgggctcaagtgatcttcccacctcagcctctgaagtagctggcactacagctgtgcagccatcatgcccagctcatactttttttaatttttaaaattttcatagagatggggtcttgctgtttaccaggttggtcttgaactcctggcctcaagtgatcctcccgccttggccttccaaagtgctgggattacaggcgtgagccactgtacctggcctgcacgtctttattgaacatctactatgttgggcattgttgtcatctctgaggcttgcaacagcaaagaagaccaagccctcaggaagatgacattttgctagcagagacagaaggtaaacccaaatacaatatttcagatgttacaaagaagactgaagcaggtaagggatgtagtgggtcagcttggagccagtatcttactttgctcctgacaactatcctaggaaaaaccagaggacagaaatcatattttcattttactcatgcggaaacaggtaaagaggctcaactgagtacacacagctcatgggggcaggaccagaactagaaatcgacccttcggagtctgagtccactgatctttctgcctcgttcctcagcgtctccatcaagggccggggctgctgactcctttcagcagtgccatctgtataccagcatggggccctatcttagtcccctgagtgttgctatcaaggaatgcctgtggctgagtgcttttttttttttttgcataaaggaatataaaactatttattaaccactgttcaccagtatttacgataaagtaaacaatatacagttggataacattctgattactacaaagttgttcttcctggcttttgctgaaccagtaaagcaaactgaagattgaggctacatgtaaggaatgagctggggtaaagaaaaaacatgcaggtcagtaggttagattacaaaaggttgttcacacatttatggcagcaggtcctaaactgccagcatctctaaccatctgattaggtttctatgagccaagtcttacatattccattcaacatgatcttttagtcaatgtagcaacagggatttcaacattttgttaaggaatggcccactagggaaatttttaaatattcatttaacttagttttgtttagctagttaaaacacactagcatttgtcttgttttctcatctggatgtggaaacctgctgtgatggcagtgataaaatttttcctttcaggaattttgcaaataaaccaattatagacgctttaaaattatccaatttaaattgtcctatttagaattacttatttcacttgaaatgtatggcttcaggaaaattttcaatttaccttgaagtgattatctcttatttagctcggaataatggcatctcagaaatatgggtttacctgtgattttttgtttgggtgaatgcttaaaaacaaaaaaaaatttatgtatgcattttatagatacacacacacaaaaaaacatgtaaaaaatctagaatggtccttaggcttatgggaacacaagttttgattgagtaatgactatggacatttcccccaacatttagaaaagctgttctttaatgaagaggaaataatatctttataaagacaagaggtttatttggctcatgattctgctggctggaagatgggacatttggcatgggcctcaggctggctacattcatagaaggtgaaagggagctcatgtgtgcagaagtcacagggcaagagtggaagcaagagagagggggaggtgccaggctttttttaacaaccagctgtccaggaactaaaagagtgagaactcactcacccccacctcccaggaagagcttaatctattcatgggggatccacccccgtgacccaaacacctcccactggggcctatgatgtagtttggatctgtgtccctgcccacatctcatgtcaaatcataatccccagtgttggaggaggggcctggggggaggtgattggatcatgggggtggacgtctcccttgctgttctcatgatagtgagttctcacgagatctggttgtttaagtgtgtgtagcacctccctctttgctctcttgttccttctccagccacgtaagacttccccttcgccttccatcatgattgtaagtttcctgaggcctccccagccatgcttcctgtacagccagtggaactgcaagtcaattaaacttcttttctgtataaattacccaatctgaggtagcctgtttaaaaatttttttttctggctgggcacggtggctcatacctgtaatcccagcactttgggaggccgaggtgggcagatcacgaggtcaggagatcgagaccatcctgtctaacatggtgaaaccccgtctctactaaaaatacgaaaaattagccgggcgtggtggtaggcacctgtagtcccagctactcgggaggctgaggcaggagaatgtgtgaacccaggaggcggaggttgcagcgggccaagattgcgccactgcactgggcaacagagcgagtctccgtcccaaaaaaaaatttttttgtttctttataatagagatagagttacaccatgttgcccaagctggttgccaactccttggctcaagcaatccacccacttcagcctcccaaagtgctgggattacaggcgtgagccactgcgcccggcctcaggtagttctttatagaaatgcgagaacagactaatttcaacatgagatttggaggagacagacatacaaaccacagcaggaccccttgccttttgccactcaagaacaactcatgctgtccattctaatgccagcatcccagtttcaggacaagaggcaggaatgccttgcttcagcctgcatctcttgttgtcagaggcacgccaagcatttttcaagtcgtgccctggaatgtcctagcaggtgacagctgcctcgaatgagcgtggacttgccgggagggcacagactgttcccgtgagtttctatcagcgatcgttcaactggagagactccagacgcttttgcagagatcaggctacatcagggcaatcttggtccccaggaacatttggcaatgcctggagacatatttggttattataattgagtgtgtgttggggaggggtgtggttgctactggcatctagtgggtagagaccagggacactgctaaacatcctactgtgcacagaacagctcccacaacagaaagtgagccagccaccatgtcaatcacactgaagttgaggaatcttggattctaaccacagaattatcaaattattgataatttttgagaggtaagagaggagaagatggagaaaggacaaaaggagagacaggtagtgattaggaggcagagttttggcaccaaacaactctggctcaaagggccatggtacagtgacttccttttctgtctcacctaactcatttttaattatttatttatgtttttttttttttttttgaaaaagagttttgctctcgttgcctaggctggagtgcaatggcgcgatcttggctcattgcaacctttgcctcccgggttcaagtgattctcctacctaagccttccaagtagctgagattacaggcatgcaccaccaggcccagctaatttttttttttttggacgagatttcaccatgttgatcaggctggtctcgaacacctgatctcaggtgatccacctgcctcagcttcccaaagtgctgggatgataggcgtgagccaccgcacctagccgtcatgttttaaataggaataatggcagtactatttgctgggattattatgcacatcaagcattaagcacagtgcctgggacctacacagtcaaatgcccagtaaatgctatctactattattatgttttttagagacagggtctagctctatcacccaggctggagttcagcagtgcaatcatagctcactgcagcttcgaacgccaggggtaaaaggatttgcctgcctcagccttccaagtagctaggactttaggcatatgcccctacactcagctaatttttaaattttttgtagagacagaatcttgccatgttggccaagatggtctagaactcctagcctcaagcgatcctcccatgtcagcctcccaaagcactgggattacaggcatgagccaccacccttggcctttactattattatcattagctgtgagaaagaagcagagaatggctgggtggggtggctcacacctgtaatcccagcactttgggaggccgaggtggaaggatcacttgaagtcaggagttcaagaccagcctggccaacgtggtgagaccctttctctactaaaaatataaaaattagccaggtgtggtggcacatgcctgtaatccccagttctcaggaggctgaagcaggagaatcgcttgaacccaggaggcagaggttgcagtgagtcaagatcatgccactgcactccagcctggccaacagagtgagactccttctcccaaaaaaaaaaaaaaaaaaaaaaaaaaaatggccggcgtggtggctcacacctgtaatcctagcagtttggaaggctgaggtgggcaggtcacaaggtcaagagatcaagaccatcctggccaacttggtgaaatcctgtctctactaaaaatacaaaaattagccgggcatggttggtagtgggcgcctgtaatcccagctactcaggaagctgaggcaggagaatacttgaacccaggaggcagagattgcggtgagctgagatcgtgccactgcactccagcctggcaacagagcgagactccgtctcaaaaaaaaaaaaaaaaaaaaaagcagcagagaaaaaaggaaagagaaaatgatgtggaagaagcactatttctgaggaatggagctaacaagtaaaacctttttaaaaataactttcagtgcttatactcttctttgtaaaagtttttatttttatttatttattttattttattttattttgagatggagtctggctctgtcacccaggctggaatgcagtggcacaatctcagctcactgcaatctctgcctcctgggctcaagccatcctccctcctcagcctccagagtagctgggactacagggaggcgccaccacacctggagaattttttgtatttttggtagagaaggggttttgccatgttgcccaggctggtctcaaactcctggactcaagcaatccacccacctcagcctcccaaagtgctgggattacaggcatgagccactatgcctggccaataaaagtttgtaaatggcaattttatctgattatagaatggatccctaatcattgtagaaattttggaaaatacaaacaagtacaaagaaggaagatgaaagtatgcagaaccttgacctacgtgtagcagaggccacttctactccgagggttctggtgtatttcacagcaatctttttcctccatgtaacctaagggtggcgggcatgccctgggggcctttgccctggccctttgtccacctccaaggctgcccttagcatgtcattgaatcctcccaaaagatccaagcccacaacccattgacaagcgaggtggagctctacagaactgctgacgggattcacgctgcaggactccatcaacgtccctatgagatggctctgttttcctcatgtctcatctcttctctctctctctctacctcctccacacaccttccgctaaaggagaccatcaggtcctaaatcaagcttgtccaaattaggcccaggatggcttttgaaggcagcccaacacaaatttgtaaacctttttaaaacatgagattttttttgtgtgtgattttttttttaagctcatcagctattgttactataagtgtattttatgtgtggtccaagacaattcttccaatgtggcccagggaagacaaaagattggacacccctgtcctgaattactcagctctgttcttcaacttacaaaccccagttggcaaaaccaaaagcttcatggtcctttgaacatccttccaagaaagaagcttgtcccccgaccccaagctgtccatcagggttaggtgtccattcacgtaactaaaaatcaagtctttttctggaatatggaaggatgggttctgccattaaggcaaacaagaagtcagcatttacggagcatttacatgtaaatgcactttctgtgcataaactcttctagaccgtcacagcagtccaggaagagaaacattgtttttagctctattttacagatgagtacatggaggttaagcaacacacccaaagctctgcactggtaagtggccttccagattcagccctagctcctgctcttgacaatttcaccgtgttgtctcctctccatgtggctccatgagttgcagcgggcatgactggttgtagaccttcccctcccgctttctcccagagctctgatttgtccaggaggcaacctgccctgccttgatggaagccagtcacagaatcccatttgctttggctagacacatacttttccaggctctcttgcaagtggaggtagctatgacatctactctgggccaatgaaatgtaagagaacaactttaagcaaccattaccatagtcacgtatgtgtcatagtgccatataggtgacatatgacatatatgtaacataatgacatatagtgacatatataaggaagccagtggagggtttagttaaatatcatttggctgcttgacttttagctatataagttttaagatcagctagaagtaagtggttaaaagcaagcaaggcaagttaagtttggtgggcttagagaaagcccttaagagaaactccgcttgggcaggcttctgggaaggataattagggccttcggttctcccctgtcctggtcctaagctcctacagccactcacgtgagaatggcgaaaccgaacgctaacctgatgaagcccaccaaacttaacttgccttgcttgcttttaaccacttacttctagctggtcttaaaacttatatagctaaaagtcaagcagccaaatgatatatacctaacccccccaccggcttccttacatatgtcactatatgtcattatggtacatatatgtcatatgtcacatatatgtcgctacgacacatatgtgactacggtaatggttgcttaaagttgtttttcaggactatgggggcagctcctgtccagttcgaacccgttgagatcaatgacccttcaactgaacctgtgcaaatgccggagaagtgaccttttgacgtcagagggcccaaaactccccgagatcatgctaatgctgccattttctaaacatgcaccctatgaagatccaggaagcttggctatgtatgtgcagattgccaatgacctcacttttccttgcctccaatcacctcttcccacactttagaccaccctgctcctttattccataaagatccctaaattccatcttcagggaggcaagtatgagaccttttctcctgcctccttgcttggctgcgttggtgtgaataaattcttttcttttgccaaatccatcataacagcgattggcttactacccatgggcagaaggggacaggttcgctatctagggcagaggggaggaaaggaaacagccagacccttgatagcatcctggggccaccccactgaccctcgggccacctgcatctggactgcttatcaagtcaaaaaaaatttttttttttgagacggagtctagctctgttgcccaggctggagtgcagtggcatgatctcggctcactgcaacctccgcctcacaggttgaagccattctctgcctcagcttcccgagtagctgggattacaggcatccaccaccaagcctggctaatttttgtatttttaggagagatggagtttcaccatcttggccaggctggtcttgaactccttacctcgtgatccacctgcctcagcctccgaaagtgttgggattacaggtgtgagccactgtgtccagcctcaagtaaatattaaatgtccttatgacttaagtagtgtgaacaactgacttggtttgcctggggctgtcccagtttctgcactgcagtttccagatccttggaaacctctcagtcccaggcaaacagagacagctggtcacccaagatttaagacactagtcgtcggacgctgtgttacttgcagctgaagacattttcacagatacatatgtgtggataggtgcatttttaatgtgtattggatcaagacatacagctgtcctgctcattgcaagcatgacatcatgatgattttccaatgccattaaatcatattgttcaaaagacatgtgaatagttcatgcaaagtgctttaaaagcatagctggaagttcgaataagccatgctttagaagcatggctggaactttgaataagccacattagtccaggtctctgtaccattagggctgaacctggaaatcaaactctgctgctgccggctcgttccagagagagatgttatcttcaagaacctgattaatgttcggaaggaaaagaaagccaacccgtgtcattcagcatcttggtctttcacgctgggacgataggggaaagcgggtcatttttatcagcgttgggtgcggagaggtgatcaggccctgctggaataatagagctgctgctttacaaaatgtttgtgaaaacgacatgaaatggaggcatcagcagcttgagttgcagcctaatggaaacccagcagagaccacgacaaaggcagaggtaggttttcagaggcaaggattgacttttaaaaatagtctttattgtctccttttaaaaataagttacagaggctgcaggtatcttaagacaggtgagaaaaagatgtcatgtctgggccgggcgcggtggctcacgcctgtaatcccagcactttgggaggccgaggagggcggatcacgaggtcaagaaatcgagaccagcctggccaacatggtgaaaccctgtctctactaaaaatacaaaaattagctgggcgtggtggcacgtgcttgtagtcctagctactcaggaggctgaggcaggagaatcacttgaacctgggaggtggaggttgcagtgagccgagattgcaccactgcactccagcctggcaacagagcgagactccgtctcaataaataaataaataaataaaaataaataaataagatgaggggtttagatgagccctcgagccccattctgcaagcacagagaggatacaacccgctttagacacagccagatctcaatgcagatctcagtacccccattgactggctatgacctactttgctgctctcagcctcagtgctgtcactgttgaaaagggattacacctttgtcttggggttgtatgagaatcaaacaggcttgtgtgtgtggtgcaggcagcccacggttttgcacaggcagtgtgggtgtgtaggaacagccacttccatccactcctccaccctaggtaaaaagtcagctcacagagactctcctggactatctcagccaacatttctgtgcaaaatgtgtatctcactatcacatgctattttttttttttttgagatggagtttcgctcttgtcgtccaggctgtagtgcaatggcgggatcttggctcactgcaacctcacctcccaggttcaggcgattctcctgcctcagcctcccaagtagctgagataacaggcacttgccaccatgcccagcaaatttttgtattttggtagagaggggatttcactatgttggccaggctggtctcgaactcctgacctcaggtgatccacccgcctcagcttcccaaagtgctgggattacaggcatgagccaccgcgcctggccagcatgtgctattacaatttcctcaaatcaaatggttccaagatgataaacatgtgcattggttcagctttcgtaggattcatgagcttaaacgctatccctgggtaaggataagtgttgataagtgtccagggagcccctggcctcagcaatttctcagcatcttgctggggaccaagggaccggagaggtgcctgccagtgtacataggaagggaatgccctcatgttgcaccctggaaggccaatatgtctgttttctctctgtggccattttaatggactgtggatttacatccacctgtcacactggcctttcctttgattgcagtcagacactcgttcccaaacaaatgtcaccttcttcaagacccttgttcccactctgttcccaaatgtcaacttcctcaagcgcagtttattcttctctcttccaagggctttctagactgccttagttttcatttttcttacaataacaactactaatactgctcttttctgtatgtatgatataaaaaaattatggccaggcacagtggctcatgcctgtaatcccagtactttgaggctgagatgggaggatcgatagagtccaggagttcgagattagcctaggcaacatagcgagactctgtctctacacaataaaaaaattagctatgcctggtggtgtgtacctgtggttccagctaccagagaggctgaggtaggaggatcacttcagcccaggaggttgagctcctgggtgagccatgatcacaccactgtactccaacctgggaggcaaggattgacttttgaaaatagtcaattttcttgacgtgggtttccagctgtctgccttgacagagtgagaccctgtctcaaaacaaacaaacaccagtattgcttagttacctttgttttagacctaaaagaatacttgctcctggccgggcacggtggctcaagtctgtaatcccagcactttgggaggccgaggcgggcggatcacaaggtcaggagatcgagaccatcctggctaacacggtgaaaccctgtctctactgaaaatacaaaaaatcagccgggcgtggtggcgggcacctgtagtcccagctacttgggaggctgaggcaggagaatggcgtgaacctgggaggtggagcttgcagtgcgctgagatcatgccactgcactgcagcatgggcgacagagcgagacaccatctaaaaaaaaaaagaaaaaaaaaagaatacttggtccttttttttttcttttttagaggcagggtcttactatattgcccaggctggacttgaactcctgggcttaagggatcctcctgcttcagcctcccaagtagctgggaacacaggcatataccaccacacccagcttggtctatttaaaaaattatacaaatattacataaatatggtctcactataaaaacatcaaacaatacagaagtataattgctagtacttattgaatgctttcatatgattggtgtcaggctctggattaagcattttacacaaatcatctcagtgaactcttgcagcaactctatgaggtaaggactattattattatctcttagacaggataaagaacttgttcaacgtcacagagtaagtggtaggaacttgaactcgggcagtctgatctgagcccatgctctcgactgggactgtgaaagctccagccagtgactggagttcaaggaagacagagatcaggatagtctgggagaaggctgctcaaatcgagatgcaacttacaggggagggcacaacttggaggggtcaggaaaagattccaggcactcagagagaagggggagctgagacaaatattaggaatgggtgtggtatgccagggtaggtgacaatgaagagtctgcccaattaggacatatcagggacatatgtgtctgcgttgtaaagaaccttaacatgggagccatcttaggttctagagtgagagcatggcatggagatgtgtctatgaaacccagtttggaagacatggtgatcagtatttccacaccaaggagagagtgcactctccctttgaccttctgtctaagacgatccaaggaattcctggaagatgcgtttgctcctcaatctttagctggggttggcaaactatagcccacagtcaaaatctggcccactgcctgttttggtacaactcacgaactaagaatagtttaattttcatttttaaatacttggggaaaatcaaaatcataacattttctgataaatgaaaattatatgaaattcaaagttcagcatctgtgaataacatgctattggaacgaagtcatgtccattcatttcagcattgtctgtggctgtttttcccgacagtggcagaggtgagtaatcacgacagagactgtacactctgtagagcctaaggtgtttagtacttggccctttacagaaatattttgctgaacttacaggagtgtaatcatagctcactgcagccttgacctcctggctagagcaatcctcctgcctcagccttccaagtagttgggactacaggcgcatgccaccacgccttggtaattttaaaaaaacgttttgggccaggcacggtggctcatgcctgtagtcacagcacttcgggaggccgaggcaggtggatcaattcaggtcacgagttcaagaccagcctagccaacatggcgaaactccatctctactaaaaatacaaaaactagccgggcatggtggtgcatgcctgtgatcccagttactcgggaagccgaggcaggagaattgcttgaacctgggagatggaggtttcagtgagctgagatcgtaccactgaactccagcctgggcaacagagtgagactccatctcaaaaaaaatgtctggtagagatgggggtctcactatgttgctcaggctggtctcaaactcctgggctgaagccattctcctgccttggcctcccaaagtactgagataacaggggtgagccactgtgcctggctctaaagaaatttctgcagctagaagagctctcaccttacatgaatgaagaaatcaatgcccagagaggtgaatgctgttcaccaattcactgactcatccagaaaacagttcttgagcgcctactacgtgtcagccctcctgatctattttcactttcaagagacattgagacataggccagctaccaaggccatgtggcgagacagcagggctcttcccaccccactgcttcgactgagaccagagcttgttttcttctctgggctctggcagggaactgggccgtgcccagtgcatgcaaggttggccaacagatttcctgcacctgctcactgatgctacctggcagtttctgggaccgcacttagccctctgcacatccttcactcctttgaaggagacagtaagtgttgtgagttcatttcttcttcttcttcttctttttttttttgagatggagtctcgttctgtcgcccaggccggagtgcagtggtgcaatctcagctcactgcaacctctgcctcccaggttcaagcaatcctcgtgcctcagcctcctgagtagctgggattacaggggcacaccaccataccctgctaatttttgtattttcagtagagacgggtttcaccatgttgacgaggctggtcttgaactcctgacctcaagtgatccacccacctcggcctcccaaagtgctgggattacaggtgtgagccaccgcgtccacttgttatttttgattttttttcccccagactcttaccagtgcctagaatgagacacatagtccttcccttggagggcccagcgagctgtgaagtggatagaagactggcccttggtgtccctaaccctacccctaaggcctttggctaagctggcccagaataattaaagatgtgaacagagattaagctccaggtgggcacagcagctcctgcctgttatcccagaactaagggaggccgaggcaggaggatcgcttgagtgcaggagttcaagagagctgctggttttaaatgtggcacttcctacactcattttctcttgtgctgtctctctcctgccgccacgtaagacgtgcttgctttcccttcgccgtctgccatgactgcaagtttcctgaggcctccccagccatgcagaactgtgagtcaattaaacttctttcctttataaatgacccagtctcgggtagtatctttacagcagtgtcagaacagactggtacacagcccatgtgcatccctgtgtaaagcctggccccaaggagttctcttgaactcctgcactcaagcctttgcccaactcctccctcagctcagaaatctttgtctcaaactaagtgctctgcagcttcactaatcccttctccttctggaatcttcctgatgccctcagctacatcaggtcctcttccttcctgcagccatagcccccttgttatcccattgacatctaggcattccagaaccatctaggcatttgtgtttctgcctcaacagactgcacctcctttaagggactttgcctttttccttcatggttctagcacaccaccccgtccctgatacattgcagtaaatacacaaggaaggaaggaaggctggcaggcatggagggtacacacagtactgcattttgttgaaacaaggcctaaagactgcaggtgcaggtggaaaaatttcaagtctcatgatagacaccacgagggcaatcgcatctatcaaaggcggtgagtcagccctggagaaatccaattaaacatccgtcattcgagtgatactgctttgcattctgctatcaataccgtttctattctgagctggctcagcatctgggctctcttgtgccttccactctcagtcacctgctgcgagttcctgccactgtgtggcgtcctctcccccaaatccaccctctccactcccaagtccatccctcctctcaagctgatgccaacaaaagctgatttgtatccagcccaatctcattgaatcctcatcatctgtagggtggtattcttattctccactttacagaactctcagagaggttaagtaaatcgcccgagatcagacagcttgcaagatttgaaagaagacagtctaactccagagccctgacaattgccactacaacagactgcctacgcatgtcacccagatataccaggctgtcatcttctgttcccatacccccttactttatcccgttctttcagtcaggagccttctaaaatgctttcaggccgggcgcggtggctcatgcctgtaatcccagcactttgggaggctgaggcaggcagatcacttgagctcaggagtttgagatcagcctgggcaatacggtgaaaccccgtctctacttaaaaaaaaaaaaaaaaattagccaggcatggtggtgggcacctgtagtcccagcaacttgcggggctgaggtgggaggatcgcttgaacctgggaggcagaggttgcagtgagctgagattgtgccactgcactctggcctgggtgacagagtgagactttcaccagtggcagttccaaggagtgggctttcttagggatggcagggaatggtttcagtcccacctcgtaatttccattagccttcaaaccacctcaacatttaaaaagtgcttttgggccgggcgcggtggctcacacctgtaatcccagcacttcgggaggccgaggcggggtggatcacgaggtcaggagatagagaccatcctggctaacacagtgaaaccctgtctctactaaaaaacacaaaaaatggtggtaggtgcttgtagtcccagctactcgggaagctgaggcaggagcatggcgtgaacccgggaggtggagcttgcagtgagccgagatggcaccactgcactccagcctgggcgacagagcaagactgcatctcaaaaaaaaaaacgtgcttttgaaatgggaaatatcaggtaggatagaagcaataagagaaaatgaaataaagaaatgggaaatagacatttttcccaattttgtggaaagtgtaagaaaaaaacttgatagaaactatgcaattttaattaatttgtacgacacaaatctcactaaaaaccatggactccctactgcgaaggcagctctaaggtaagtcccctgattgtttcatgtgaccaactggctggccctaagcccctcctgtttaggaatttttttttttttttttagacaatgtctcactctgtcgccaggatggagtgcagtggcgtgatctcagctcactgcaacctccgcctcctgggttcaaggaattctcctgcctcagcctcctgagtagctgggactacaggcgcccgccaccacgcccagctaatatttgtatttttagtagagacagggtttcaccacgttggccaggatggactccatctcttgacctagtgatccgcctgcctctgcctcccaaagtgctgggattacaggcgtgagccaccgcacccggccctgtttaagaattttaaagcaatcactccattttttttttttttttttttgagatagaatcttgcttgctctgttgcccaggctggaatgcagtggtgtgatcttgatctgggcttactgcaacctccacctcctgggttcaagcaattcctctggctcagcctcccaagtagctgggattacaggcaccagccaccatgctcagctaatttttgtatttttagtagagttggggttttaccagtttggccaggctggtctcaaactcctgacctcaggtgatctgcccacctcggcctccctaagtgctgggattacaggcatgaaccaccacatccggccgcagtcattcctttcagctgagcttctaaggactgaaggaaaaaactcttaagaacacaatctgcaggccccggggaagcctcccctgccctcttcccacccattcctgcttagcccatggactgggccactaggaccactgtctcagcttagccctgctcctgccaaagcacagagcacacttctctgaagccatcacctatctaccatcaccactggcaattcccatcagagtcattgcaccagcagaagcagataagcttttgataataagtaaattaatgtttaagtcaacttcatgtttattcagcatgctagtgattagtggtctcctttgtaggcaagcgagaccctggggcttgataaaccacaaagaaaacgcaagtaatctctgttggatgccccaaagtagggcaggctaggactagaatgagtgatgtgctggggaatgtttaactggctggaagcaggggagggaggtagaagccttgctgtgaatcatttgccaatttccacggtgtaaatactcccactgctgcagattttgagctacccacagttgaacaactggttctccagattcctaaaaatttaacatcactggctagaatcaacaagtgggcagatttaggggtgcttcttcaacactctaaagtattcattcaacgtttacttagaagagaagctgagtattatttggggaaaaggttacctgtggcgatgatgatgacaatgattttggctaccatttactcggaattcaccacgcacagggcgggtgcagtggcttacacctgtaatcccagcactttgaaaggccaagaccagcagatcacttgagatcaggggttcaagaccagcctggccaacctggtgaaatcccgtctctactaaaaatacaaaaattagccaggcatggtggtgcacagctgtaatcccagctactcgggaggctgaggcaggagaatcacttgaacttgggaggcagaagttgcagtgaaccaagatcatgccactgcgctccagcccgggcgacaaacagaatttaccatgcaccttttacaccctaagtgctttatacactaagaagtgcttcataggcactaaatgctttacacagatcatctcaatcctgataaccactgtttgaggtgggcactacgtggttgtctcttttatacaggaagatcccacagctcagagaggttaagtggctccatcggaatcacacagctagtcaatggtggagctgggacactgacctgtggatcctgattcggacacccacattatctcaatgaagaacatctccttcattgtgtggcaggtcaggtctcactaacgcaggcctccatgacagctatttcagcagggactgtgtggttaagttaaacattaaaagctgaaagtggctgggcaggcagtgactcatgcctgtaatcccagcactttgggagcccaaggcggatgcatcaccttgttcaggagttcaagaccagcctggccaacatggtgaaaccccgtctcacctaaaaatacaaaaaaaattagctgggcgtggtggcaggcacctgtaatcctagctactttgggaggctgcagcaggagaatcgcttgaacctgggaggcggaggttgcagtgagccgagatcctgccattgcactccagcctgggcgacaagagcaaaactctgtcactaaaaaaaaaaaaaagaagaagaaaaaaacaaagctgaaggagcctactgggcatggtggctcatgcctgtacaatcccagcactttagaaggcagaggcgggtgaatcacctgatgtcaggagtttaagaccagcctggccaacatagtgaaatcatgtctctacaaaaaatacaaaaattagctgggcatggtggcgcatgcctgtaatcccagctactcggaagctgaggcaggagaatcgcttgaacctaggaggcagaggttgtagtgagcagagatcgcaccactgcactccagcctgggcgacagagcgagactctgtctcaaaaaaaaaaaaaaaaagctaaaagagccagtgcccttatacaaaggctggaatgtaacagaaatcctccaacagttttgctcaggcctttcctgggccttgaaacatgacgagataacgaggcaattcttaacaggacacgtttaggattaaacaagttttattgggggtgtgaagaaactccccaggcctccacaaacaagtttattgggagtgtgaaggaagtccccaaacctccatgatttagcaggagacaagataagggtaatcaccccagcaactggacccatttagattaagtaaatttactgaggcttcagaggaaggtcttcaggactcagaccttagttagactagaagaagctgattatttaggtctttaggtgaacgcacacttacacgtggacatatagtttagaaggtatgtaagctctgggaaactttgtaattttgagttggtctggtggtattttccaggctttttccctgtaactggtaacagaaatagaaactccctcctttcccagtttatttgcatctcgttattgggtcactagaataagcagcccaaccctcagtttgatccaggaacaattgttccaagcaatttaattctgataccagttcagcataatgctcttggaaaaaaatcaaaatcctgcagatagcaggactcactttgcttagaacgacggggtttatgtgtatgtgtttttgtttgttgtttgtttgtttgtgacagggaaacagggtcttgctctgtcatgtaggctggagtgcagttgcttgatcatggctcaccacagcctcaatctcccaggctcaagacatcctcctgcctcagcctcctgagtggctggaaatacaggcgtgccctagcatgcttggctaatttttatattttttatagagagggggttccaccatgttgcccagtctggtctcaaacttctggcctcaaagcaatcctcccatctcggcttcccaaattgttgggattacaggcgtgagccctgtgcctggcccccaccctcttctttgacctctgtcaaagaagaccttctttggccaccattcctggccatggaaggctgtttacagactacctattgttacttacacatggtcttgggtggggttgtgtctccctcctgtaatggaaaaaagttggaatttttggctgctcaacctccaaaccctagttttagggaaagcattcactgtgtcagtcattattagagaagttcaacaagggagcacccccacttcctcagactcagccaatcagaagctcatgtccaagactttgaccacagagcaaatgacagagataaaaggatggagggattagacttgtgctgtccagcaatggcggcttcctggccagattggtcctgtggccagtctctggggctttcttgatccatactcatttccaagcctgtccttccgactcctgagcccccatccccactcatagccttctacaatcccattttttggttgagtcaggcagagttgatttctgttgcttgtggccaacaaccctaaccaaaagaagcgtcagagtgttcccaccaaccacaccgggtcttctctctaagggaagtctggatggggacaattttctccatcatatatcactttagtgagtctgtactgtcttctatcgattggtactgggctagcttgcacctaatcagctgtgggcagatatcagtaagagggtgttagaaagcacttattagaaaatttggggccaggtgtggtggctcacacctgtaatcctagcactttgggaggccgaggcaggtggatcacttgaggtcaggagttcgagaccagcctggccaacatggtgaaaccccgtctctactaaaaatacaaaagttagtcaggcgtggtggcgggtgcctataatcccagctactcgggaggctgaggcgggagaattgcttgaacccggggggcagaggttgcagtgagccgagattgcaccactgcactccagcctgggtgatagagcgagactccgtctcaaaaaaaaagaaaaagaaaagaaaagaaaatttgggcttgtgttaggtgctttgggggacagtttaaaggaagtgagcatttactctggattggatgttgtcaggaagtggaggtaattctctgatagagtgtcttcctaattctttcctttaaagggagaagaacagagtaagactgaaactgtgattgatggagaactagcagtcactcatatgagctaggaaatggggctattgggtgatttttgtggctgggacaatgttcatgtctttatctgccttcaggagtagtgttattttgtcttgatctatcacggtctcaggatggccttgtctgatgccggcaatctgcaaaattgtttacattcaacaggagaacactttggccaagctgtgagtgtcaagccagctcccggctgccaggggcagcttttctctttctcacagtgtaggaagtaatttatatacttcttttctgcccataagtaattactaaatctgcaactatagggaccagtcctacccattttagtcttccctgcggggcccaccatgatgctttgcatactgaacgtgctctgggaatgtgcccagtgaactaaattatgggcacagagaactctctgggacttggcattattaagatcatgctgaagtatattttcaaaatttaaaatgtgactcatacaaatgtggaatgaacacttgtcaaaaaatttatttaacccattaatgagggaaccagtaaaatggtaaagctcgctccaagggcatttaaaaagtggactcatcagcatctttaatgaaaaccttagcataagattgctaaattcgagagaaatctggttaacatgctataagggcaataaaaccataacctttaatgtcgtcttttttctactggacagaaatctacaagttaacgtgtaatttcactatgtcagtgctctaatcaaataataaataacaaagtcagatacatgtactctctccaagataattaatcatccgtgggcaggtcattaagcagtgcctcagtatgacatggaaaagacattcttccttatttccaatttttagttaattttcatttaagaatcataacaaaagactcttttgtggcttcttaggaacatattcaactgaaatttttgttttaattgtgttttagagacagggtcttgctctgtggtccaggctggcatgcagtggtataatcatagctcactgcagccttgacctctcaggtttaagcaatcttcccacctcagcctcctgagtagctgggattatgggtacacactaccatgcccagctcatttcaaaattttttgtagagaggagttcttgtgatgttgcccaggctggtctcaaacccctaggctcaaggagtcctcctgcttcgacctcccaaagtgctgggattataggattgagccactgtgcccagcctgaaatttttctaatgcccacctcacacctggcaattccccaggtatcagcagcagcagtagcatcctgctgatacggacaggcggcagaaggacagggtcccaggtgagggctccaccctcaagcctggacctgcagccctaaatgagaacaggcattcctgttttcacacccaaatgttgccttttccaaaaccgctctggaccaccctgcccccatcctatgcccttaagaaccccaaaccccaggctccacaatcagaatagcaccagagtggcgtggcagagaaggagagaagagaagaagtgtctgaacatcgagaggagtttggctggggacagtcagagaggagatcatctgaggatggctgaactccaggggaagattaccttcccactccatcccctttccagctccccttccactgagagccacttccactacttaataaaaaatttgtattcaccatccttcaagtccatgtgacctgattcttcctggacaccagacaagaacccaggtaccaagagggcagggtgtaaaaggctatcaccctgaatctccactgaactggttaacacttagtcatctgcgtacagcaactgctaaaagagtattaattgtaacacatccctagacgctgccatgggaccagagcccaaaagcactcaccccagccccaatctgctcacctgcatgctccccctcctgcaaggggtttgatgcagtggcagccaagtaagcgagccacacccctgtcacaagtcctgcaaaggggacaggggagctcccccatttcactgctaacatttactgaacagttattatgtggttaggtattgtaatatcttttttatgtatcttatctcatctgctcctgaccaaaaaaaaaaaaaaaaaaaaaaaatccctaggaggtaattcattaagccactagtgtggttaataaaatatctatttggtcttcatccctggttcccagcacagagctcctaaagcccctggagtttcctgagcgataggactgtcttttgttatccatagcaatccccattgtactacatctgagtgtatgctaatgagggcactcaggctgagttccctagagagatggcttcaggttggggcctcgtcaccagaagagcaaatgtgtgataaagacaggggagaggggtgggcagggcacggtggctcacgcctgtaatcacagcactttgggaggtccaggccggcagatcacgaggtcaggagttcgagaccagcctggccaatatggtgaaacccccgtctctactaaaaatacaaaaattagctgggtgtgatggcacgtgcctgtagtccaagctacttgggaggctgaggcaggataattgcttgaacctgggaggcggaggttgcagtgagccgcaatcatgccactgcactccagcctaggctatagagtgagactccgtctcaaaaaaaaaaaaaaaaagacaggtggtcgggggcactgccggatgcagaggctcatgcctgtaatcccagctactcaggtggctgagccaggaggatcacttgagctcaggagtttgagaccagcctgcacaacatagcaagactccatctctaccaaaaaaaaaaaaaaaaaaaatttaggccgggtatggtggctcaagcctgtaatcccagcactttgggaggccgaggcgggcggatcatgaggtcaggagatcgagaccatcctggctaacatggtgaaaccccacctctaccaaaaatacaaaaaaattagccaggcatggtggcaggcgcctgtaggcccagctactcgggaggctgaggcaggagaatggcatgaacctgggaggcggagcttgcagtgagccaagatcgcgccactgcactccagcctgggtgacagagcaagactctgtctcaaaaaaaaaaaaaaaaaaaattaaaaattagccaggcatgttggcacccacctgtgtagtctcagctacttgtgaggctgaagcaggaggctcactcctaggaggtcaaggctgtagtgagctatgatctcaccactgcactccagcctgggtgacagagtgagaccctgtctcaaaaaaaaaaaaaaaaaaaaaacaattcggcgggcaacttccagtcccactcgctgacctgccaggaagaggaggaggctggcgactgaattataaaagctcttgaacagtgagatccagggagcctctaggttggtggacacactggtgtgctgggagggcagtgcacccagagagggcatcatggaagctctgcacggctccctctccacaccttgcccaatgcatctctcttccatttggctattcctgagttctgtcctttgtaataaaccagtaaacataagtgaagggctttcctgagctctgtgagtcattccagcaaactatcaaacccgaggaggtggtcgtgggaacccccaagtttgtaattggccaggcagaagggtgggtggctccggacttgcgactggcatctgagataggggcagtctggtgggatggggtcttttaacttgcaggacctgatgctaactccaggacatagtgtgatagctgaattgaattgcttgggcacccagttggcatccaagaatcagagacttagtgtagaaaaatggcacgtatttggtatcagaaaaaacacatttggtgtcagaagtggcgtcagaaaacaccacacagagtaacagagaagtcgagcaatttgctcaagaccacacagccggtaagcatctccgctgggacacagaccctggcgcaggcaaagtctgtgactgtaactgctacgtgtgctgcctcttgctgcgcctgacctcctcacaccagccaccaggtgcaacatccttatcgccttgcaggcaagaaggaaaagtgtggctcagggtagcaaagccagtgtttcctgaacatcagtcacttgcacgttaccatggcaacagttgctatgcctcaagccctctctattattattattatttgagacagggtctcactctgtcacccaggctggagtgcagtggcacaatctcagctcactgcaacctccacctctcaggttcaagtgattctcatgcttcagcctcctgagtagcttggattataggtgcatgccaccgagagccgctaatttttgtatttttagtagagacggggttttgccatgttagacaggctggtcttgaactcctggcctcaagtgatctccccacctcagcctcccaaagtgctgggattacaggcgtgttctcttttattgtctatttaatacttttctttatgttgattctcttttttacatcaccataaatgcaaacctaatattgttcctaaaagacatgaaaattatatatatttttttcagcagggtctcactctgtcgtccaagttggagtgcagtggcgtgatatcagctcactgcagcctgggttccagcaatcctcccgcctcagcctcctgggtagctgggggtactacaggtgcactccagcacactgggctaattttttgtaaagacggagtttcgtcatgttgcccaggctggactcaaactcctaggctcaagtgatcctccactttggccttccaaaatgctaggattacaagcatgagccactaggccttgcctgaaaataaattctttttctttttctttttttttttttgagacggaatcttgctctgtcaccaggctggagtgcagtggtacgatctcggctcactgcaacctccacctcccgggttcaagagattctcctgcctcagccttccaagtagctgggactacaggtgtgcaccaccacgcccagctaatttttgtatttttagtaaaggctgggtttccaccatgttggctaggctggtcttgatctcttgacctcatgatcctcccacctaggcctcccaaagtgctgagattataggcatgagctaccatgcctggccgaaaaaaaattcttaattaatgttttcctaaatgctgcctaaaatcatcccagagcgtacccaactttgggaaaaactggaccaactaagtctgataaagcaggggttcccaacccctgagccaccaccagtacaggtccttggcctgttaggagccaggccgcacagcaggaggtgagtggcgggtgagtgagtgaagcttcatctgcatttacggccactccccatgctcacagtaccggctgagctccccctcctgtcagatcagcggctgcattagattctcataggagtgcaaaccctattgtgaactgtgcatgtgagggatctaggttgcacgctccttataggaatctaatgcctgatgatctgccactctctcccatcgcccacagatgggaccatcttgttgcaggaaaacaagctcagggctcccactgattccacattatggtgagttgtataattatttcattatagattacaaagtaataatgatagaaataaagtgcacagtaaatgtaatgcacttgaatcatctcaaaaccatgcccccaccccatccctggtccatggaaaaattgtcttccatgaaaccagtccttggtgccaaagaggttggggatcgctgctataaagtcaaacagccaagatatcaacccaggctcctgcctccaagtctagggctgttttagctacaacatgggccccttcaccacattgtgtttctggttaactgtgtcgggcagcaagtggagaggaactggaaatttctcaacttggctctaaatgagaccaaagagaaaaaccaaatagtgatggcagacaacagatggtgagagggctcactcctccaggcggttaatgatgccctgggcaagctttccgaatttaatcaccagagcgattctggactatgcttcagtccagaatactctgattgttctaggatccgctggaattttcctctggaataactcaaggtcagttctaacaggtctaagcagcagcatgagcattgaagacatggaacagtagcaaacagtcaccatcttcaagggggaatgagagcactgacttccaatctaagagccttttttttttttctttgagacagagtcttgctctgtcacccaggctggagtgcactggcacatctcggctcactgcaatctccgcctctcaggttcaagtgatcctggtgcctcagcctcccaagtagctgggattacaggtgcacaccaccatgcccagttaatttttgtatttttagtaagagatggtgtttcaccatgttggccaggctggtttggaactcctgacctaagtgatccacccaccttgggctcccaaagggctgggattccaggcatgagccaacgcatccggcccatctaagggctttttaatgacctggtatagctcaccaaactccacgtggggaagcctcctatcgactcaagatgtcagtttattcaggcatttcccaaagtgttgctttcaaaggtaaattaaacttcattatctaaatgagcagttttcgtcttgggtcaaactatagctccaaaatgctttcataggtggcagacatttaagaattttcagccacgcacggtggctcatgcctgtaatcccatcattttgggagactgaggcaggagaatcacttgaggccaggagtttgataacagcctgggcaacacagcaagaccccatctctacaaaaaaattaaaaaattggccaggcatggtggcatgtgcctatagtccccactactcaaggggctgaggcaggaagatcactggagcccaggagttcaaggctgcagtaagccatgattcatcactgcactccagcctgggcaacagagtgaaagcccgtctcttaaaaatacatatatatttctcggccgggcatggtggctcatgcctgtaatcccagcactttgggaggccgaggtgggtggatcatttgaggacaggagttcgagaccagcctggccaacatggtgaaaccccgcctctactaaaaatacaaaaattagccaggcatggtggcgggcacctgtaatccccgctactggggaggctgaggcaggagaatcgcttgaacttgggagacaaggttgcagtgagccaagattgtgccactgcactccagcctgggcaacagagcgagatgctgtctcaaaaaaaaaaaaaattaagaataagaaaaatctatcttctgctctgctcttggccagctcacttgatttctttaaaaaaataaaaataaaaggagaccctgtgttggtttttagaagtccaaaacaggaacaaatggaaagcaatagtcattgaatgatgacaaattctgtttggttggacactgtcagaaagcctgtgcttataattttcttgataaatatagccccaggttcaatcaaaggcataatcaacggacttcaataacggatgtgatgatgaagacaacagatggcatcggaattatctgacgccacgggagaccacaaacacacatttcattatgattctgatcacgatcctaggctacaggggagagagagaggctcccactgctgtgccaaggagtcaaactaacatagggcagattttgtactttttattaacatctgaagcaagttttcgtcaagaaaggattaagaagatgagtcatctataagcagctgatggacactagggttcttctatttcagccagcgaagaggtgaggggatgtctgtgccgtgggaggtgagggggcatcagcctacctgcttctaagactctcaatgaccaggctatgccttggaacaactagacaagactctggctgtaagaccaggccccagcattttctttaaagttctccatgtgattgcaataggcagtcaaggctgagacgcggaagcatggggggatgttggcctggtgcaagatggacacattgcctccaacttctggctacttctgtaaaggctgttgagggatattagtcagtgctcaatcggggaagcagggtcactacgtgctctggggcaagggatgcgttataggaattagaccttctacaattgtccagggagctggggagatggcggtctgggaagggtggagaggatgagagaagtcaccgacagctgatatgagagtcagatgcgtccagctgttaagatggagtggcagaggggaaacaggtagaggggtccctagggggctgctgcctcgtctgccaagcatccagaggcgggggggctgctgttggtcagcaggcccagcggtcaggaagacaagctgcaagggacacaggggagggtgaggacaagctggaacctctgtggcccctctgtcagatcacctccttgtctcatctggacagccttcaaagagtaaacactgatgtcaccttccttccacttcccaaatctcccgcaccatcctcttctgcctacttttaacccacaaccctacagggaaaaggatatggtttggctctgtgtccccaccaaaatctcactgcaaattgtaatccccacgtgtcgagggagggaagtgattggatcatggcggcagtttcctccatgctgttctcgtgataaagggtgagttctcatgagatctgagggctttataagtgtctggcatttcccctgctggctcttattccctcctgctgccttgtgaagaaggtgcctgcttccccttctgccatgattgtaagtttcctgaggcctccccagccatgcgaaactgtgagtcaattaaacctctctattttataaattactcaatctttggtattttttttttccagtgtgaaaatggactaatacaaaatgggatatgggaaataaagttctcggtatagctaagctttcttttttcttttctttcctttttttttttttttgagatggagtcttgctctgtcgccaggctggagtactgtggcacgatctcagctcactgcaacctccgccttctgggttcaagtgattctcctgcctcagcctcctgagcagctgggtctacagggacacaccactgtagtcacctaatttttttttgtatttttagtagagatggggtttcaccatgttggccaggatggtctccatctcttgacctcatgatccacccaccttggcctctcaaagtgctgggattacaggcgtgagccaccgcacctggccctctttcttctttttgagacagagtctcactctgttgcccagactggagtgcagtggcacaagcatagctcactccagccttagactcctgggctcaagcaatcctcccacctcagcctctagaatagctgaagctacaggcatgcaccactatgcccagctaattatttagtttttttgtagagatggggtcttgctatgttgcccaagctggtcttgaacttctaggctcaagcgatcctcccacctaagcctctcaaagtgcagggattacaggtgtgagccactgcattcagcctaaatttttaatagaatattgcagcacagactagaaggaacagaaatccactcaagctcacttgagaaaaatatagtttagtaaaggtgtaagaaaatgaagggaaatgctagcatcttgacagatggtacccatatgtatcttggggagataatggtttttgcttggaattatggcttgacaaacacctggggtggtacttgcaagagctcagcataaattggtgccgtggcttcttagaagagggcaaagctgctgtggataagacaggagaagtaagtgtcttccttggaatggagggagctgagataaaggagaagagaaaaagaggtgatgaaactggaccccgtgtgtggaaaaggccaagaaaaaggaaaccaccccactgccttatggcacagggtggtgaaaaagatcttgttaaccaggaatgtcaaatgtggatttctagttctcctagttatggccatatggataccacgatgccctttactggaacattgactttttttttaagacagagtctcactctcttgcccaggctggagtgtagtggcacaatctcggctcactgcaacgtcttcctcccgggttcaagggattctccagcctcagcctccctaatagctgggattacaggcatgtacctccacacccagctaatttctgtatttcttagtagagacagggtttcgccttggcctcccaaagtgctaggattacagacgtgagccaccgcgcctggccttttctttttttttttttttttttttttttttttgcaattaaaaaaaaaatcaaggtctttgcagggctgtggctggggctagtcctctggggctggagggacagttacatggtgagccaggagacgattgtcactggtcatggtttttaagctgtctgctgtgaagagatcaatgacaccctttttgtgatcctcattgtattgctcctcaaatgacctgtgggagtaggatagggcattgttttattctgttgttatggaaaccagtgaagcatctgagtttcatattcagttggatggaggtacaggactcaaggaaccaagcctaggagcagagaagacttgaggatggaagcccctggaaatgtacagacattgtacagctggattttggatttccctaggcggtggcaacacggggtgggaggtatttctccaagggtctggagaaaggatgcgcagggttgaacaaggtgcaacatcttatggactacccagttcatctggactgcaatgggaatgtcatggctgagttccttctctgctttcaaaggacactgtctctcttgttattcttgaggcagacgctctgtcctctttcccttcaaagactggctttctctgcttatgcatagacttcggtttgccactccctcatcatccacctgggctaatctctctgcatcccaggagaaagactctgattggcccagactgagcaaatttggaccaatcagagaggagtgaggagaggctcaagcccccctacacctgaggctgctacttggtcccagctactcagaaggctgacgcaggaggattgtttgaacctgggaggcagaggttgcagtgaaccaagattgaaccactgcactccagcctgggcaacacaatagactctatctcaggaaaaaaaaaaaaaaagaaagaaacgaacttcctcttccacgtaatatccttcagatattttgagacaaatcttaggtgccccttgagacttctctcgtcgtttcaacaaccttgacatggaaaagatcatcattccaccctctaatctcccccttctcttgtgtctcctcttccaaacaaagaaaccagtgtctacacttatgcctgtatctatccatttccaaactcaatttcttcctggtggtaaaggaaagtaacatttaatgagcacttacgtggtagcaggcactggactgagcacttaatatgcttgatctcttttactcctcatgaccaccctgcgagatactggatgcatggctatttaacagatgaggccaccgaggctcagagaaggtaagatatttgtgcaagattgcacagcctataaatggcagaggtagaatgtaaatctaggtgtaatttaatccggagcaagtaaacacacttaccaggcacgaggtctatttatcagaaagcaaccccatccaagaccaggatatctagtaatgaaaaaacagggatctggccaggcgcggtggctcacgcctgtaatcccaacactttgggaggccgaggcgggcagatcacgaggtcaggagattgagaccatcctggctaacacagtgaaaccctgtctctactgaaaatacaaaaaattagccgggcatggtggcaggtgcctatagtcccagctacttgggaggctgaggcaggcgaatggcgtgaacctgggaggcagagcttgcagtgagccgagatcgtgccactgcactccagcctgggcgacagagcgagactccgtctcaaaaaaaaaaaaaaaaaaagaaaaagaaaaaaaaaaggccgggcatagtggctcaagcctgtaatcccagcactttgggaggccgaggcaggcgaatcacgaggtcaggagttcaagaccagcccggccaatatggtgaaacccggtctctactaaaaatacaaattagctgggagcagtggcgggtgcctgtaatcccagctactagggaggctgaggcaggagaatcgcttgaacccaggaggcagaggttgcagtgagccaagatcaagccactgcattccagcccaggtgacagagtgagactttgtctcaaaaaaaaacaaaaaaaacaaaaaaacaaaacagggatcctaccacgtttggcagaacccaaccaggaatgtcttggattgatctaatataacttgagatccccgaggagtttaggggactgaggacagacacagtagactggaattccaggagacaacaagatctaagtaactgatggctcaatgaatagcagccaattacataacatgaaatatgtaagtcaggatattgccttaagggggtgctcgggaatctggttgtgtagacccaaaacaccaaggcagctctgctaagtcacttgcagttttattccctcccatttctctttgggcatcctgtcctagaactgtcaagaaagggttggtattttatttgaaggaaaatgtgggaaggaggctcagccaagcattatcctattcaattcagaccatcacgtgatagggacaagcccttctcaatctctgctgccactcacatcagcagctttccagaaataagcaaagggaatggaaaaacccttaatcgccaggccacggtacatgcaatttactggtatctattgccctgtctttctaagaagcttcttttttgggagatttcaaaaaaatgatgagaacccggcacaggatgaagctatgagggtgccccatgtagtgtgtcatcttcccctttccccagcctcaccagggccgtctctgtcattgttgctgccacactgtggctcctgctctgggcttggcccttatatgaattgctgtggtcactcaatatggtagactgaagaatggtccctgaagatatccatgtcctaatgaacctatgaatctgttaccttacacggcaaaagggattttgggccaggcatggtggctcatgcttctaatcctaggactttaggaggcctaggcgggaggatcacttgaacctaggagttcaagaccagcctgggcaaggtgatgagatcccaactgtattagtccattctcatgctgctatgaagaaatacccgagaaggagtaacttgtaaagaaaagaggtttaaggctgggcgtgatggctcacacctgtaatcccaacactttgggaggctgaggtgggcggatcacgaggtcaggagtttgagaccagcctggccaacacagtgaaaccccgtctctactaaaaatacaaaaaaaaattagctgggcatggcagcgggtgcctgtaatcccagttacttgggaggctgaggcgaataattgcttgaacccgggaggtggtggttgtagtgagccaagattgagccactgcaatccagcccagtgacagtgcgagactccgtctcaaaaaaaaaaaaaaaaaaaaagaaagaagaaaagaggtttaattgactcacagttccacatagcttggaaggcctcaggaaacttacaatcatggcagaaggttcctcttcaccaggcggcaggagagagaatgaatgccagcaggggaaatgccagatgcttataaaaccatcagatctcatgagaactcactatcatgataacagcatggcgcaaccacccacatgattgaattaccttccaccgggtccctctcatgacatatggggattatgggattacaattcaggataagatttgggtggggacacagccgaactatgtcaccatctctacaaaattcaaaaattagctatgtgtggtggcacgtgcctgtggtcccagcttcttgggaggctgaggcagtaagattgtttgagcccaggaattaaaggaagcaatgagctatgaccgtgtcactgcactccagcctggacaacagagcaagacttcgtctctgaaaaatatatatttttaaaaaggaaatttgcagatgtgattaaattaaggggtcctgagatggggagatcatcctgggttatccaggtgggccctcaatgtcatcacaagtgcccctacccatttatgcctgaggttgcaattttttgaatttgagaaatcagacctggtgatagccttgagaagtagcatataaataactcccacatgcttagtgttccaataatggaatgctaggcatacatttaagagaaaaacagagggatttgacacagaagagcaaaggcgacaggatgacctcaatcgagagggactggactatgccatgctgctggcttcggagatggaggagggaaacacaagccaagaaatgcaaagagtacggttctagaagctggaatgaatgaggaagaggcttctcctctagagcctccagaaagcacggctctgccaacacctgatttcagctcagtgaaatcgatttcagacttccagcctccagaactgtaagataaaagaaatgtgtgttgttttaacacatttgcagctgtttgttacagtagccacaggaaaataacgcacttagctgcattatcactctgttccttcctatgaatggacccactgttcaccctaaccatcagagagccaggcagttctcaccacccagacctgccacatggaagggaacccttgagattatgtgaccgtgggagaagcaggaagatgagccctcattaattcattcaatcaatcttcactcagagtgcctacgctgagtttggctgtgtgctgggtaccgtcaacatttttgggagtgaaaatagctcagcctctgtcctcatggaggtcagcatctaggaggagagtcagatattgaacatacactcacaccaatgaacacaaatttacaaaaggcttctaaggaaaggattgcagggatggtaatgggacagggactggggaagtgctgggaaggtgtccctccagaaatgccctagatctcagtcctcgaggggacagagtttatcaggtgccttagtccatttgggctgccattctccctttcttagcctaggtggcttataaacaacaaacaccgccgggcgcggtgctcacgcctgtaatcccagcacgttgggaggccgaggcaggcggatcacgaggtcaggagatcaagaccatcctggctaacacggtgaaaccctgtctctaccaataaatacaaaaaagttagccgggcgtggtggtgggcgcctgtagtcccagctactcgggaggctgaggcaggagaatggcgtgaacctgggaggcagagcttgcagtgagccaagatcgcaccactgcactccagcctgggcgacagagctagactccgtcaaacaaacaaacaaacaaacaaacaaacacttatttttcatggtaaaagaggctggaaagtccaagatcaaggtgtcagcagattcagtgtctggtgaggacctcttcctcatagatagtgagttctcactgtgtcctcacacagtgaaagggagaaacaagctaccctgggcctcttttacatgggcacgaatcccatccatgaggatctgccctcatgacctaatcacctcctgaaagccccacctcttgatattattacattgggaattagatgtcgacatatgtatttaggggtgatacaaacattcagatcatagcaccagggaaggagaggggggtgggaggagagggatccaggcagagggaacatcacaaacaaaaaggcccccacggcaggaggggacctggtgtgtgtatcggggggtggggaggtggagactaaaaggaggcccaagggagtggtgtgtgtgtgtaagggagggagctgggggtgaggaatggatgaagaaaagaagttggagaagaggtgtgagcagatccagcaagatctcatgggctttatcatgctaacaaattctggaaggtgtttgctatggtgtaaatgtttatgactcttcaaaattcatgttgaaacttaatttccaatgcaatagtattaaggggtgagggccattaggaggtgggatcagtgcactaacaaaagtgctcgagagagcaagttcagtcctttttgcccttctgtccattctgcttgtgagaagacggtgcccttcctctctggagatcacagaagcaaggcgccatcttggaagcagagaatgagcccttctaagtatggaatctgctggcatcttcatcttggacttcccagccagactccagaactgtgagaattaaatttctatttataaattacccagtctaaggaattttgttacagcaacaggaacggactaagacagtgtttaaatctgagagttataatcagattcacatggtgagaaaatccctctggctgcaggacagagatgggcatgtgaacctgggtggtggccatggagatggagaaagatggacagctgagcattattttaggaggtaaaacaaacaccagttgatgatgaactgaatatatgaggtggagggttgggaggggtcaagaatgatgtctaattttggaatttgagatttccatggatagatggtgatgcttgaccatttgctgagctagggctggtgggtattgggactagatggggggatcatgagtttgacttggacagattgagttacaggtatctttgagacatttaagtggagatatcagatactgtaccttcccctgcctgtctttctcagcattttccccttagaaatgtgtgtccaaaaagaaaaataccgtgtgattccacttcttttttttttattttattttttgagacggattctcactctgtagcctgagctagagtgcagtggcacaacctcagctcactgcaacctctgcctccaggtatcaagtgattttcatccctcagcctcctgagtagctgggactacaggtgtgcgccaccacgcctggctaatttttggtattttagtagagacagagtttcaccatgttgcccagggtggtctcgaactcctgagctcaggcgatccacccaccttggcctcccaaagtgctgggattacaggcgtgagccacagcgcctggcctgattcctgttttatgaagtatgtagagtcatcaaaatcagagacagaaagcagaatgctggttaccaggagccaggggaaagggaaaatggggagtgagtgttgaatggtacagagtttcagtttgggaagatgaaaaaaattctggggagggatggtgatggttacacacagtatgaatgttcttaatgacatagaactgtactcttagaaatggtttcagatagtaaatattatatatattttgccacaatttaaaaaatagaagtgtgtgtgcaaactacatataagtgtgcataaaatgttttatttttatagtaaaatttatataaaatatactataataataataaaatataataaaatatgatttattatattttattattatttactattatttcatacttcatagaattattattatattatttttatggaataataaagcagttattttcccaacatcctacttaagtaaaaatctgtgtgtgacttttagacggccccgtgtgccccattccctcatatttttctcattccctcagaggtaggcactatcacaaacttgtggtaatgctttttatttttatcatttaccacccatatatgaagcccggaacaattatattttttagtttttttttttttttttttttgagatgcagtctcgctctgttgcccaggctggagtgcagtggcgggatctcagctcactgcaacctccacctcctgggttcaagcgattctcctgcctcagcctcccgactagctgggactacaggcatacaccaccacacccagctaatttttgtatttttagtagaaacggggtttcgccgtgttagccaggatggtctcaatctcctgaacttgtgatccacccacctcagcctcccaaagtgctgggattagaggcgtgagcaccacgcccggcctatattttttacttttatacactttatataaacctgttgctcaacatcttgtttttgagatgctttcatgttcatacctgttgctcattcatttttcactgctgtatagtattctgtggtacagctagaccacaaacgaggcagttatgaacattctggaacatgcctcctgatgctcatgtgtagtttctctagggcagtgctggtgaatagaatgttctacaacaatagaaatgtcctatacaaatgtatgctttccaatagggtagccactagccattatttactaatgagtgcttgaaatatggctcaggctaccgagagactgaattttacatgctatttaattttaattaatttaaactgaaatagccacatgaagctactggctaaccaggggtagacccaggagcaaaactgcaggttataatcacctgttcatctttactaggtaacaatgaactgttttccaaagagataaggccaatttccctatattttcattttatccaacttgctaggtctttgctaacctgataaactatccaaatgaaaatttctgagaataaaaagggctctatcagtcagggttctccagagaaacagaaccaatactactgaagagatttattttatttgttttttctttattcttttcttttttcttttttttttttctgagatgggatctcactctgttgcccaggctggagtgcactggcataatcttggctcactgcaacctccacctcccaagttcaagcgattctcctgcctcgactttccgagtagctgggactgaaagcacacgccaccacagccggctaatttttgtatttttagtagaggcagggattcaccacattggccaggctggtctcaaaactcctgacctcaaatgatctgcccaccttggcctcccaaagtgctggaattacaggcgtgaaccactgcacctggcctggaaaaagatttatgataaggaattggctcatgggattttggaggccaagaagtcccaagatctataggtggcagctggagacccaggagagctgacggtgttaagttccagtccaaaggctggcaggctcaagacccaagaagagctgatgtttcagtttgcgttcaaaggccggaaaagacccatgtcccagcccaagcaatcaggcagcaggagttccctcctactcaccctttctgttgtagtcaggccttcaactgattggacggggcccacccacctctacattagggagggcagtctgctttactcagtttaccaattcaaatgttaatttcatccaccaatgctcttgcagacacatacatcgaagaatctttggccaaacatctgggaaccctgtggcccactcaagttgatgcataaaattgataatcaccagggtcttacatggtaatctccctcccaacccaatggagtctaggtggttcagaggtggtcctctgagcagaatgtaatacagttctaggaagacggaacttctagagagtattttccttctcgaaacttgttctgaccatgaaaggcaactcgtagcagcaagagcttgtcaagtacagaacatttatttgatttatttattttctttgacacagagtctcattctgtcacccaggctggaatgcagtggcacaatcttggctcatggaaacctctgcctcccaggttaaagcaactcttgtgcctcaagcctctcgagtagctgggatttcaggtgcacaccaccatgcctagctaatttttttgtatttttagtagagatggggttttgccatgttggccaggctggtctggaactcctgatttcaggtgatccacctgcctcagcctcccaaagtgctgggattacaggtatgagccactgcgcccagactaacatgtatttctccattcaatcaacacagattcccaccttcctccccacctcccagtacatttagaaattcaggaggagggtccttccattcagaagtctagcttagaaattctccctcctctctcctccctttagtctctccgtttcttcttccttcctttccctcccctacaccccaacttcttgtatattttgtccaagacaaactgcttcttagatcttctgcaattaagggcatctcttcccatccgatatgtacagtggccccggcaatggtgacctgttcctggaagatgctatttaaaaccctgtgtgcaactaaagtgacgcagagctcctgaatgtggctgaaatgtgtcaagttacataaacgcacatgcttcattttgcccttggcttgaagctcttcctaacagacttcagaattatcagctcattaaaggggaaaaaatgcaggtttataaaaaaatcttaaataatcatcataataaaatcaaggccccagggtagagttgcacttaatggttgagagccactctcaagagagttggcacctcccaagaggatctcaaggaaaccacagtgaatcccatcttctcttggggagaggaatattttctgggaattctctggagacaaccataagcagccctgatgccctactctcccacgaagcacaatgttaacaatgaaaggaaagaagggaattttgaattgcttactacctaggaagggccacccaatttcatacctgtgtctgttttcatcccttgctatgatgctgcagggagatatcactgtcccccttgtactgatggggaagccgaggctgaaacaggacaaagtatttgctccaggccacacagttggtaagaagtagaattcaaagctagttgagagaccccacagcttgatgactgagaccatggactctgtgatatgcaagagaggtgataggaagggaagggcatggtcgctttaaatgctacagaaggaaggaagggaagtgctgggtagaggagggtgtggtccctggtaagggctccacccccacgcctgtgcccacagtcctaggtgaggacaggcatttttgttttcctgcccaaatgttgcatttcccaagaccaccctggcctgccatgcccccatcctgtatctataaaaaccccaagaccctagcaggtgacacacaagctgctggacgtcaagagctgcagatcggcaaagaagacacaagcgtctggatgtcaagaagacgtcaagaggaacacgctggcagaagagcacatgacagatgctggcaggccatctactggcggaacaaagtggagtttggcctgggcagtcggaggagtgcccaggctgctgggcggcctgactccagggggaaaccttcccactccatccccttctggcttcccccatctgctgagagctacctccactcaataaaaccttgctctcattctccaagtccaggtgtgatccgattcttctggtgcaccaaggcaagaacccaggatacagaaagccctctgtccttgggacaacgtagagggtctaattgagctagttaacacaagccgcctatagatagcaaaactaaaagagcaccatgtaacacacacacactgaagcttcaggagttgtaaacatccacccctagacactgccgtgggatcagatcccgacaactggcccatctctatggtcccctagaggtttgagcagcggggcactgaagaagcgagccactccgacatcacacaccctgcgagggggacaagggaacttttcccatttcatctggacttagaatgctatttcatggaaactgtacaaccatgggcaagagacttgacctctcagtgcctcagtttcctcatctataaaataaaggctatgtgatattttctgcctggatggtgatagtgaggattatatgaatcaaaacaataaaacactagaaaactagccagcatagaaaatgttttaaaagaactgctatctacaatgcacacactttccgtgtgtgtgtgtgtgtgtgtgtggttttcaacacaatgcatgcactattaccccattttgaatctctgccaggttcccagggcctgtcctctttaccacacttggtacctcttaataaaacgaagttactggatttcaagcccaggctctggaaatattggaactcaaaggctgtgctcttgaaatatgtccttcgcacgcctaccttccctgcctgctgcagttctgtctctggctgattaaaacctgcttttgcccagagcaagctgagtggcagggcatgctatccctttttatgaaaatccagcaagcgggtgtaaaaggaagataaccacacccctgccccatgtggaggccaaagatacttaattatctgaaacccagataaacagcaggagcgggttggtagactagatgtggaaaagctgaagcgagccagaggggctgcaagaagaattattaaaaactaatgatgtgattcagtgctggaaggaaggcgagaaaatgagtctgaggttgttgacagcctctgagagttcttgcctgcagtaagatgggggcaggatgggtagggagatggggtagcagtgggaggtactaggaggtgggtggaacatagggtcaagaagtgagaaaacacaggcgtttcaagcattatctgccagatgtttgctgcctgttttccggaggcagttttgtgttactgccctgttccagtaaagttgataaaattgccaagcctcaagaaagagatctctaaatgccattttgcacattggaaaccaggggtcaagcaaagggaagtcagcaagggaacacacactggaaattcagagtgaggagcacactcagagttcacacctgcctgctgggagctcacttatggctggtctgtgaacttgacctcctgggcctgattcagggcaagtgggtgtcctgggttggggtggttcctgatgcatctttctgttagtaagcatttgatgtgggttatgtgagcatgtgtgtaaagggcttagcacaagcctaggtccacaataaggggtctgtaaatgccaactgttgtgggccttaagagttattacgggaaccgggttctttttctacagcacattcccagcagactgacttcacaaactttgactgtctgcattggagctcatcattttggtctctgaaataaacagtttatgtgcagagaaatggtgatactgaaacaccaggggtttggtctaggtcctgctgctcgccgcatagaaagcccatcactgacaagatgagtattgccaaggaagattttaattgcgtgctgcagccaaggagatggagctcagtctcaaatccatctccctgaccaactaaaactaggagtttacatagcagggaagaaatgtaacaatgtataagaaaacaggaactcgggaggagcaaggaagcaatcatgaagaaaacaggaactcgggaggagcaaggaagcaatcatgatgaatgaggggtctggtatctcatctctggatgtggtaatctggtgagtttcagttctttgatattttttgagaggcctgggggtcccttcctgaggaaataactcagataagacaaatgagggcttcaagctttaagatcagaaaggtcaacttctgtatttatccaaaagagtatctatgggccgggtgcagtggctcatgcctgtaatcccagcactttgggaggccaaggcgggaggatcacgaggtcaggagatcgagaccatcctggctaacacggtgaaaccccgtctctactaaaaaatacaaaaaaaagttagccaggcgtggtggcgggcgcctgtagtcccagctactcgggaggctgaggcaggagaatggcgtgaacccgggaggtggagcttgtagtgagtccagatcgtgccccactgcactccagcctgggtggcagatcgagactcttgtctcaaaaaaaaaaaaaaaaaaaaagaacatctatgatgggactattgggtcagtttcaatggtacagaaaagtccaaagcctgacttagtaaaatctgtccaagttccaccacacacaattcaacattgcagaacaagacaagaccaagtgtgggactgggggcatctaatcgggggtttgtccttgcgttgtaaaagagtaaggcaaagagaaaaggggtcctggcattgagaataaagataacagaacagcttaaggttaagggctctgccccacgagacagacaccttgggttcaaatcctggtactactttatcctagctggtgacctcgaacaagtcactttgcctctccgacctcaatttcctcattcataaaataaaagagatagaacttactctattggggttcttgcgaggactcaagaagctaaaattaaggggtgaatgcatgcaggggacgtagcactcagggtggcatatcagtgcccgcgggaaacagcaactctgtgtgctccctcatgtgtccaaggtcacagaccaaggacgtcagagagccaggatgatgacctctgatcccacatctcccgagttctcaccattccctgggagtagggaaatctccctcctcttcttcctcactgtcgtggcaggaaaagaggaagaacaggcaggggctgtggatcttgggggaaaggacaagttaaatcagctgagaaaaaggaagcccatgaaataatctaaatgtgagggtgccagagctttggggctggggcaggcagtcccccccggactcatgcttaaaagagtcaatgcaggctgggtgcagtggctcacacctgtaatcccaaggaggccaaggagggcagatcacttgaggccaggagttcaagaccagcctggccaacatggtgaaaccttgtctctactaaaaatacaaaaattagctgggcatggtggtgggcacctgtagtctcagctacttggaaggccgaggcacaagaatcgcttgaacccaggagacggaggttgcagtgagccgagatcgcaccactgcactccagcctgggcgacagagcgagactctgtcacaagaaataaaaataaaagagttaatgctgcgagaagcattggaagtgagacacattctcaaccatgaaataggggctgactcacatggtctctgcagcagctgatgggcattaaggtgattacttcgcagcaggtgtgacaaaacaaatctcaccgcggctattacactacggccaccgggagtctttcagcccagggctgtcacattcctgtcacttaaagcttcctcgcctgagcctgaaaatgatcagtagggtctgaaatttttttctctcctactctgtgccaagagtgtctcacgtgtgtgtgtgtgtgtgtgtgtgtgtgtgtgtgtaagaggattgttggggtaaggatggagtgagaaagaataatttattgcacatttgacaaatattcatgacactcagtgccaggcattgttccaaatgctgggaagacgttgtgaggaaattggataaggtctctgccctcatggagtttataaacttgaaggaattatcttggtagtttatactcaaagcttccttccttcctccttttctttcctcccttccctcccttcccctgtccgcctctcccctccctctccccctcccttctctcccactcccttccctccttccctgattcacttaataaacattctggagtcagactgcatcctagcttggctacttattagctaatgcagcatcaggcaaattttgtaacctcccattacttcccatccaaaatggagataagaacaggacacactcacaggataagccccacagcttcgggaaaaaccatctctgaggaacagccaagaaagtgaattcaagcagggccttggctcaaagcctgttggcctggagggctgaggatgatggatgaggactttgtgcagatctgagcatactgtgtcctttgtcctggttgccttagtgtccaccgtctatctctgagattgatgaggcaggtgcaccactgggcaagctacacaccatacaaggctgagcctggttggggagcgtcatcaccatccaatactgtctgtaggactccattccagcaagacatctgggggcctggaagggggtccctcccctggaaaatgtcacagaatccctgatctatgtcctaacaacactcaggtccttctgtatcctttagataatttgatttatcctagggtctactgttgacatttgtccctaagtggtcagattcatgggctagatgaggacattcaatgagatcacaagtcaagagcttactgcagagctgcctcttaagaaatgctagttattcttgtccttaagcctgggctaagtgacaggcatgtgcacatccatacacacacacatatccatacatccatacccacatccacacacgcacacatccacacccacacacacatccacacatgcacacacatccacacgcacacatacacacccacatccacacacacacccacacaggcacacacacatcctcacacacacatacacacacacagatccacacacacacatccacacacccacacacatccacacacacacatccactatacacatatacacacacatccagacacccacatacgaacacccccacacacatccacacatccacatccacacacatccacacacatccacacaaatatccacacacacgcgcacacagtaaaggtcagtaagtgcacagtggtaaccattgttcctgcagcagcaccattaggtaaataaaaataaatatatatttttaaaatttttaatttgtatttgtatttttaaattttttgtatttttgtagttttttttttaaacaaagggatcttgatcttgattacttaaaagcaagactcatgttctctgtcttccttttattttattattattttgggatagtttctctctgttgcccagactggagtgaaatggtataatctcagctcgctgtagcctccgcctcccaggttcaaatgattcttgtgcctcagcctcccaagtagctgggattataggcgcacgccaccacacgtggctaaattttttgtatttttactagagacgggtttttgccctgttggccaggctggtctcaaactcctggcctcaagtgatctacctacctccgcctctcaaagtgctaggattatagatgtgagccaccacacctggcctctctgtcttccttttaaaacacagggaggaaaggattgtttctgaatgctcacgtatcattttagcttatttccagacaaaagggaagatatttcttagccatgaagtggaaatgttctagaaccttcctcagagatgtctgtgaaaaggaattatgcatgggaagcatttagctcacggtcttgcacatgcaaagggctggataaatgacagctgtgaatactgcagttcattttatgtggcgagagggaaggtcatataacgtcccagtgagagtatgggctttcaggagttcgaggctgcagtgagctatgacggcctcactgcattccaccctggacgacagagcaagaccctttatctaaataagtaactaaaaatttataaagaagaggtgttttaaaagcagaaagagctgagtctgaaccctaactccccatttactagctgggaggccttgggcaggctgtttcatttcttcaagcctcagtctcctcatctgcaaaatgggatgatcacagactcagcctcttggtgttgtgaaaaatcagtgaaagaataggggaggggcctagcctgcctaaaagatttgatgttcctgctgcttccagtggagggtgggtgggtgggtgagctgacaggcagcgcagggaattttccagccaggttgcctcttaacctctggtttggtttggttttgcttgtaacctttcactgtttgtcggcaaaagcccaatttttaaaaaaactttttcattttaatttgatgtttttatattttttgtatttttaatttttttcttttagcgacaggctctcactgtgtctcccaggttggagtgcaatggtatgatcatagttcactgcagtcttgaacccctgggctaaaccgatccccccacctcatcctcctgagtagctgggacaaaggcacacacagccacacacagctaattttattttttgtagagacagggtctggctacattgccctgtctggtcttgaactcctgggctcaagcgatcatcccgcctcagcctcccaaagtgctgtgattacaggtgtgagccactgcacctggccttaatttgtgctttttagagacagtgcctctctctgtcacccaagatggagtgtggtgatgcgatcatagctcactgcagccttgaactccaggactcaagcagtcctcccacctcagcctcctgagtagctgggaccacaggtgtgcaccaccacacactcagagcccaactttttaaatgagagtttgtcttgaaagactacctgcaactcttcaggaatgctgtgctctgtagataatgaacgttcaacccatgtgactctgatgttgctagagaccccatcttgttatttttccccattttagaaatgagggaactgaaattcagagagtccaagtaacctgcccaagctgacaggcttaaaaaaaactcaggcctatctgagagcagagtgtgcgctcgtgaaagacaccagcacagggtacagcctctgcattcccttccctctttcttccccgtgggtgatacagaaagaacaaaggttttggagtcagattggcctgaattcaattccaacttcagggtcttgcttaaaacaggagatgacaatatccacttccctgggtggtggtgagaatcaaatgaggcttttaaaaacgtgcataatgcctttatctcagtgcctggcacacagtagacgatcaacaaatattaggttttcctctctcctccacacacttctttccttggccacatccccaaaacactcacatgaacctgagctcagactcccggcggaccaagacttcccggagacgctgaatttttgccatctccagctcaatctcctctggcatcatggttgtctccgccatggagatgatgtccagctgatctgtgcaggagacaggaaatacaaccatcaggaccccaaggctgcaccatgggacagaccctgacatggttccagggcacagccttgctctgcgaccatcatacaccttgaggacagacttcagcctgtgccgcaaatgtgtattcgtgagcacaccctttgggaaccagaaaatgtgttttccaaagtaatttacttcgtttgctttgttttgttttgtttttagacggagtctggctctgtcgcccaggctggagtgcggtgaagcgatctcggctcactgcaagctccatctcccaggttcacgccattctcctgcctcagcctcccgagtagctgggactacaggtgcccgacacctcgcctggctaatttgttgtatattttttagtagagacggggtttaccatgttagccaggatggtctcgatctcctgaccttgtgatctacccgcctcggcctcccaaagtgctgggattacaggcgtgagcactgcacccggccttgtttttgttttttgagacacagtcctgctctgttgcccaggctgcaatgcagtggtgtgatctcaatctcagctcactgcaacctctgcctctgaggttcaggcgattctcccacctcagccttataagtagctgggattacaagtgcacaccaccaggcccggctaatttttgtatttttagtagtgatggggtttcaccatgttggccaggctgacgtcaagtgatccgcccgcctcaacctcccaaagtgctgggattacagtcgtgaggccaccacgcctggctgggaactttgttatgatggctagtggaggctcacaagtgggctcacaaaagcctgattaaggccttgtcagctcctgcctggtcccagattctaagcctctgctccccctgaccacgaccactttgccctgtggtctaagcctctaagaccagccgactctaggcagaagaaagttttatcataattatcttatagtaatactactaccaagtagtgttaagtattttttcatttgttttggagactaggcctcactctgtcatccaagctggggtgcagtggtgcaatcatagctcactgccgcctcgaaccctgggctcaagggacccttccgcctcagtctcccaagtagctggaactacaggcccacctaggtaactttttaatttttatttttttgtagagatgggggtgtcactatgttgccaaggttggtctcaaactcctggcctcaggcgatcctcccaacttggcctcctgaagtgctgggattacaagcgtgagcatacatacggatatataaatatgtgtgtgtatatacatatatgaatatatgtggttttttatatatataatatgtgtaatatacacagacacacttttttttcttttttgagacggagtctcgccctgttgcccaggctggagtgcagtggcacgatcttggctcaatgcaaccttcacctcccgggttcgagtgattctcctgcgtcagtctcccaagtagctgggataacaagtttatgccacgacacccggctaatttttgtatttttcgttgagatggggtttcaccatgttggccaggctgatcttgaactcctgacctcatgacccacccgcctcagcctcccaaagtgctaggattataggcatgagccaccgcgcctgggcagacacactttataaagactgaaaaagtccactaaaatgttagcagttaaaatgttaatatatatgcgtgtgaatgtatatttatactattatatgcatatacatatatccactgtgatgtaggtcttatttttctaatataaagttaggacctcactatttcgttatgtgttcttttcacctagcaacatgccttgagcgctcctgcctgtccttggatggtcttcctcggcagcagcatggaaggcggggcggttttctatttgtggctgtatcacgaagcacttaagcaatccacagacatgtaggttgtttcctattttttccccactgtaatcatgaggaaaaaaatgtaagaattattttcaccgtaagaatgttccagtgaagaacgttctcaaagtgaaaacttcgcacacatctacagggttccttcgggctatgtttctagggtgaatggctgagatataagtgatgtgctattcaaggcctttgatcggtagtgggggagactcggggcaggagatgtttttggcgtaccctgagacaccatcacatcatctgtatctgctaattccttccacacccgcccccaagatggagcccaccccacacctcagttctacaagggcgtctgtctttttccttatactcaaggaataatgaaagttggtataccttatacccatgatttggaaagttgttctctttttcctttttctcttttttttttttgagacggagtatccctctgttgcccaggctggagtgcagtggcacaatatcggctcactgcaacctccgcctcccggattcaagcagttctcctgcctcagcctcctgagtagcttgggttacaggctcgtgccaccatgcccagctaatttttgtatttttagtagagttggggtttcaccatgttggccaggctggtcttgaactcctgacctcaagtgatcagcctgccttggcctcccataatgctgggattacaggtgtgagccaccacaccaggtcttcttttttctttttgtagagatgaggtctcgctatgtggcccagactggtctggaacttctggcctcaagcaatcctcctgcctcagcctcccaaaatgctgggattacttacaggtgtgagtcactgtgcccagagaaagttgtcctgtttctacctgtccaactgccttctatgtcctggggccctggcccttgcacacgtgcacagggtttagggcgctgtgatttgcaggcttccctgaagtcagtccctacctgcttggatctctagatagaacagcgccctcttctaggagtccacctgatgcatttgtccacctgtgggactctcccggccctgagttgttcagcagacgttggattctcagtaaattggagttcctttccattacctaccccgtgatgtgtccgttccatgtgccaaaattatctgcttcccctccaccaatcaaaacaccttattttgctaaagagacagaaagaaggtaattctctggagttgattctcacattgaaatgaatggcctctcttcattctctctgagacaattccccctttttttttttttttttttttttttttgagagcaagtcttgctctgttgcccaggctggagcgtggtgatgcaatctctgctcattgcaacctctgcctcccaggctccagcaattctcctgcctcagcctcccaagtatgtggatctacaggcgcatgtcaccacgcctggctaattttttgtatttttagtagagacagggtttcgccattttggccaggctggttttgaactcctgacctcaggtaatctgccagccttggcttcccaaagtgctgggattacaggcgcgagccaccgtgcctggcctgacaactcccagttttcaagagaaacagtaacaaaggcaatggaaaaggccaagcaattatatggggagaggaaaatatttgacctgtcagtcatcagcctattgaagattttctcctctttgagttcagcatctcagagcaatgtgtgcttcttttatattttcagggagcaacaatacttcatgaaatagataagtgcagaacataaatagtgcagaatctgctattgggttggagagggggtcactgaacaactgtataagtgggaggaagagagtggaggtgggtgaatgggaaaaacatgaaattggagagattcacaatcacctcctccttgccttctaaagatggcgggtcccgaagattatctggccacctggccgagcctctgccagggaagggtgaaaagggagacacagtggagggagaggagggagtgtcaaagagaagcaggaaggagagaggtcagaggagccacctcaggctgtggcttggggagagggagcgatgtctgtttgcagaggatttgtaggaaatgtctcatgtgatgtgctgcctaaagatctcctggggccatctggttatgcttcaaggcccctggaatccaatttcgggtcctactactgtccctgacaccatgctgtggtggctcctgggattgaagcagtgaggacaggcttgagaaaggagggaaggagggaggaataggatcgaaatattaatattggctgggcacggtggctcacgcctgtaatcccagcactttgagaggccgaagcgggcggatcacctgaggtcaggagttcgagaccagtgtgaccaacacggtgaaatccagtctctactaaaaatacaaaacttagcctggcatgctggcaggtgcctgtaatcccagctgcttgggagactgaggcacgagaaccacatgaacctgggaggcagaggctgcagtgagccgagatcataccactacactacagcctgagggacagagtgagactacgtctaaaaaaaaaaagataattaatactgagtgctactgtgtgctgtgatgctaccaagctagaagaccagccttaccagatcagatggcctgggtttgagttccagttctgcccctccctggctgtgtggccttggggagttggttaacctctcagcagctctgtttctcctctgtaagggagcccaccacccaaaacagatgtgagggatgaattaccccggcacgtcacgtttaatatatgcttgcaattgccctcgttatgaccgccgcacctgctctgcccatcacctcttttaatcctcgccataagccagcaagttcagtaggttctcattttcgcaaagaaacaaaggctcagcgctggcaagggaaagagctgagtccaggtctggcttcaaattcatgctttttgaccctcacagctgcctctggtccaggcagctgttctaagtccgacaccccccattcattcctatctcagagtcaagcgtggtgccataacaattcatggccagtggggaggcttaaaacaaaaggaatttaatctcttggagttcgggaagccagaagtcggaaaccaaggtgttggcagggtcacgcgctctccagaggctctagggatggatcttttcttggcccttgcagcccccgctggctccttggtttgtagtattaggttggtgcaaaagtaattacggtttttgccactggatgtaatagcatcacttcaacctctgcctctgttttcacaggttcttcctccgggtggctctgtgtgtcttcttttctgtctcattagatttagggcccaccctaatccaatgtgagctcatctggatcctgatctgaattacccctgcaaagaccttatttccaaataaggtcacattctgatgttttaagatgcacatgaacttcaggaggccacaaacccacaagaatgaatggccacagccttgcaagcttcctgacaacaatgtcactctctccaggggcttgagatcctgcacacagagcacagccttggctggaagcagcaggggtcccagcgggagtcaccagggggtgagggaagtgcatgggggaagtggggtctggcaaaaaacagctaggcgggggcagtgtcagaaatcctcatttgacactagtcatcagccgcaagacctcgaatgagtccctttatgtctttgcgtcactttcctcctctgtacaagaattcaatagttacctgtgctggaggctttctgtgtattatctcatttaatctctattttactgagatgactctgaggcttagagaaggaaagtgacttgttcaacatcacacagccagatcattgcagagatagtattcaaacccagcttgtgctctctctctccccccccaccccccttccactccacaaccacgtgaccttaaccacgtaatccagcctcctggtgagggctgaatgcatttgtgcctgcgaaagtgcgtagttaaccaccccacgatatgagtatccttgtttttctcatcacagttcagatgggcaacctgatttccatgggacagatgctgaaaacggcaacacaccctggggcgaggcgtgggacgaagagaattaatcacatcccaggaactggcattttacctccatccccgggggaggatggaggcggtggtgccaggctccaggtgcttagcttggatttggggcaaagaatggaacaaagacctatgttgaaaagtcttgctcaaggatgtttttcttccccaagagaaaggaacgaagcctaaagcttgaatcagatacaaatcgttagaatcctttcttgccatgagctgtctctgcatcaggcactgtgttgggctcattgtaaacctcatcttttttttttttttttttttttggtggggcagggtctcgctctgtcttccaggctggattgcagtggcatgatcttggctcactgcagcctcaacctcccgggctcaagcaatcctctcacttcagcctcccgagtagctgaaattacaggttcactccaccacacccagtgactttttttgtactatttgtagagatggggttttgccatgttgcccaggctggtctcccaactcctgagctcaagtgatctgcccatctcagcctcccaaagcgctgggattacaggaatgaatctcatctcatttagtctgcacaataccttaggccaggggttgatatcctatggccaggggaccaagcgcagccccatgcttgatgttgtaagtagagttgttctggaacactgatcacgctcattcatttacatgtcatttatggctgcttttgcattgcaaaaactgagtagttgccacagagactccctggcccacgaagcctcaaatattcactacctggctctttatagaaaaagttggccaaccccttccctgggtggtatactgtaatctctccagtttaaaagttaggaaagccaggtttatccagtaacgataataactaacatttatcgagcatttatcacatgccagcacctgtgcattaccttatctgattctcaaaacagccctgggtggtcagtgctgttatcccatttcatagatggggaagtcgaggctcaggaaagggagtaagtgatggaggtgagatttaaaacaagatctctcttactccaaagctcttgttgtaatcaaccatattcatgtaagaactacctccctacgtaagtaccatcatcatcataacaaaactgagtagactgtattgctttagacacagagggagtagttattcccagacatcagtgggcaaggtgaatatctagggaggttgtttaagaaacaattccctgcctccacctccaaggattaggataaacctgggttggggtgttgtgtccagggaccttaatgaaggaggtcttcagatcagagtgaaaaatgctgatacaggacctgaataaatgagtatcacacacagtcagtttctttccagtctgaacttgtgtgatagaaattagcctgctagactgttcctttcttgatcacattttccaactagaaggcaggcatccgacagctgccaaggaatgtctccacgaggaggacaaatcacgggaagaaacgggaggagcatttcaagctggctagagacaacaagtctctcacgcacacttccaagcaagagcttgcttgctgtgtggagacagcaaagcatgaaggcacagacgtccccagggctccaactgccactgctgtcattgagcttccaggagctgagtcacttctgggggaagaggcagctaaatccatcttcccatccccaaatgccaccccagggagatgcatgcttcctgagcggtggcaccagcaaacaagagctgagcacccgggcagccctggtatgcaccagcaggtttaatcactgatctcaaaacaaaacaaaaagtaaggctacccagggacaggagtggtggaggtgatagaggatgagggctggtgatctaaaaacttctagtttaaatacaagcttggagggttaaactgctggggaccagagagatacctttcctagcccatcttttccaatcaggggtcatggtaggaatttaagctcagggtgccctgcacaacctctgcctttacttctgctttataactttacgtgcctagtactggccccagagcttgctcattttgggtgtttaccggagccatgatctagctcatatcaacctctctttctagattaataaaatgaggcttagagaggtcataagtgattggtcaaactcactcactcaattgttgcagcaacatcaagggttctgtctagatcctgctactcgctgcacagaaagccaatcactgaggcaatgagtattgccagagaaggctttaattgggtgctgcagctgaggagatggaaagagactcaaatccatctcctcaacccactaaaattagaggtagcaaggaagaaacgcaaccatgtgttacattgtgatacatccctattctttttttttttttctgggaaattattaggaaggggtaaggaagagaatctggtcaacaggatgcaggtggttggttaggcaatcgtgatggttgaggagtctggcatctcattgtccacatatagtgatctggtaaatttcaattccttaatactatctggaaggccgagaggtcagtttcttgagaaaggaactcaggtaaaatgaatgtaactttctaaaattttaagattaggagggggctgggcacagtggctcacgcctgtaatcccagcactttgggaggctgaggcaggtggatcacaaggtcagatagagaccatcttggctaacacggtgaaaccctgtctctactaaaaatacaaaaaattagccgggcgtggtggcgggcacctgtagtcccagctacttgggaggctgaggcaggagaatggtgtgaacctgggaggcggagcttgtagtgagcagagatcgcaccgcggcactccagcctgggtgacagagcaagactccgtctcaaaaaaaaaagaaaaaagaaaaacaaaagattaggaaggtaaatttttgtgtttattcaaacaaaacaaaacaccgtaaacatcagttctaaggggcaattggggcagtgctataatgagtggtagaaatgaaactcaaacccagatctatctgatcccaatgcccatgctctaaggtcaaaagagctacaaaacagtgtttccaaaactctcaacactgcatagaatttaccccagctacatattctgtactctgtcatataccactcagtatgtcatgacattcacttttttttttttttttttgagacggcgtctcgctctgtcacccaggctggagtgcagtggcgtgatcttggctcactgcaagctctgcctcctgaattcacgccattctcctgcctcagcctcccaagtagctgggactacaggcgcccaccaccacaccagcctaattttttgtacttttagtagagacgggtttcaccacgttagccagggtggtctcgatctcctgacctcatgacccacccacctcggcctcccaaagtgctgggattacaggcgtgagccactgcgcttggccgacattgactttttttactcaaactccctaacggaaatgtcccatgacatccacagacaataaatgactcttacttggcataattagaaaatagccatgaaaataaacctgaggaaacaaagcaatactgttaaattcttgctaaatactatagcctgcttaaggttcagaatgaagcttgaattttctttcttaacaaggtgaatcagcaagtactaggggcattaaagacaaagctagcaccaaattgtggctttctcctttaggtaatcaaaaaggttgataattggggagaaaatgcgtagctttcctgaagggaaattcattgctgtttgatggtacaagcatgaaagtaccactgggggtacctatcccatcccctgttgtagaatagaattccagtcctttgcgttggaaaggtcttaaacgacgttttggtcagcctcatacctgtgttggataggatgtaaaatgacttggcaagatgtggttcccagggtccctcaacaaacggttctcattcaaacttcagtgagaactcaagctagaaggacaattctcagccatgggttaagtcctactcaaagaggaatcagccattttgagcgattatttcaacccagctcatataacaaaggcaattaaatgaagggctgggggtgggggtgctattcatttcagtcattggaatatacttgggtcacagccgctgcatttagggaaggacatgagggactcaggtagggggagtcagtgttgggggagaatcaactttcacctaatatgtccttttctcttgtttgggtttttaaatatactttttttttttaatacttttatatttctagaaaatgtggctggatgtggtggctcatgtctgtaatcccggagctttggaaggctgagggaagaggatcacttgaagccatgagtttaagaccagcctgggcaacagagcaagaccccatctctacaaaaataaaatgtaaacattagccagatgtggtggcacacagctgtggtcccagctacttgggaggctgaggtgggaggatcgcttgggtccaggagtttgagggcttcagtgatctatgatggtgccactgcactccagcctaggtgacagagtgagacactatctttaataaaaaaaaaaaaaaaatttaagaagagttgcaaagagcataaagaattcccctctactcctcattaaatttccactattgttaacattaccaagaagttgacattggtgcattgttattaactatattcattgaaattttagcaatttaccaatggtcagatgttacatttgcaaaacagatttaaaattaagaagagagaaaagaaaaggggttggcgtgtgcaggcaccatggggagccaggccagcccttgaagagggcaagagaggggagtggttctgggcatgggcttttgggtttcagagtccagctctcacgcttgagccatgcatcagtgactctgggcacctcagtttcttcatctgcaacactggggaacaagcatacccatctcacaggtgattcatgtaagtgacaagcatacagaaagttctctgtaacatatgtttgctcttatatacatttaataactatgcattgagaacctgcttcgtggcagaccctgctctaagcaatggggaaggagcaatgagcaaaacagacaaaaatctctgcccttgtggacctgagcttctagcaagaggcttacactgttgtggagaacagttgctctaataatctgcaggggtcattggcttaagacagacgtcgcttcaagccctggctctatcactaattgtgcgacctgggcaaattacttgatctccctaagtctcagtttcctcttctgtaaaatgggactaataactcctgcctcatgaagttgctgctgtagggatgaaatgggatgatatacttgtccctcagtatccgtgtgggattggttccaggcctccctttggacaccaaaatccttggatgttggccgggcgcggtggctcatgcctgtaatcccagcactttgggaggccgaggtggatggatcacgaggtcaggagatcgagaccatcctggataacacggtgaaacgccgtctctactacaaatacaaatacaaaaaaaaaaaaaaaaatagccgggcgtggtggcaggcgcctgtagtcccagctactcaggaggctgaggcagaagaatggcgtgaacccgggaggcggagtttgcagtgagccgagatcgcgccactgcactccagcctgggcaacagagcgagactccgtctcaaaaaaaaaaaaatccttggatgttcaagacccggatataacagggtgaaatatttgcatagaagccccacacatcctcctgtagactttaagtcatctctagattacttataatccctaataggatgcctacacatcacttcatttacacagattcagcataatactcaaagttttgcttcttggtaatttgtggatttttttcctgaatattttccatccataattggttgaatctaaggatgcggaacccacagatacagaggaccaactgtatacaacatgtgcttggtgtagtgcctagacatcacaaagagtggtcagtagcattattcctgccatcacagtgcctttccctgaaagaagccagactaacactggggagaaaataaaattggagccaccatcaaatttgaagaacacagactcatggtcatggggaccatctcttggcccctctaggtgagaccacagccccgcagctccaacagacccatgcctgccctgagaagagaatctagagggggccccctccagccttttgtcaagaagccagttgctgctattgacccaaaagagagtcttgaatcccaagggaatagatctgcgccccatgaccagggagccaatatctgaatgcatttcaaaggctcctggtggcactctagacttcgttgtcatcaatcattcatgtaggaaagaagctcattccaacccccaagcatcctattacgggatgcaccaagtgcctcgccttcttgctataacgtgaatgtaatgggaagccgcccgttgcttttaatgagtcaccgtttcccaaagagatgaagtcactgcttttaacccagaagctcctggctgctcgatttctcccagcctgcctcgtggagaggatgccactgggcccccaagagcgatcatacctttctttgcactccgccgtcccatacatcccgtctctgtgaggtcgccccacatggaagaatttgcggctgaggaaactgacaggcttcagatcctggctatgattgttattctccagtggcacctcaagcacatttttttaacttctgcgagtttctgtttccccagccacatctgacgtgtcaaaggacacaaaagtaattcaggaggacgcaccaacagcacgtgaagacgcaggcattggcgtcaagcagacatgagtagatggtccggcatctttctaacggccgacctcggcaaatgccctaacctctttgagactcagtttccttatctgtaaatcgggggtcataaaagagagaatgtatagatcagtgcggtccaattgaaatagaacactagccacatatgtaattttgaacattccaggaaccacattctaaaaaataaaaaaggctgggtgtggaggcacatgcctgtaatcccagcactttgagaggccaagggtggtgggcatatcacttaaggtcaggagctcaagaccagcctggccaacatggtgaaaccccatctctactaaaaatataaaaattagccgtggcagagcacggtggctcactcacgcctgtaatcctagcattttgggagtccgaggcggtggatcacctgaggtcaggagttcaagaccagcctggccaacatggcgaaagcccgtcttcctaaaaatacaaaaattagccaggtgtggtggtgtgtgcctgtaatcccagctattcaggacgctgaggcaggagaattgcttgaactggggaggcggaggctgcagtgagccgagatcgtgccactgcactccagcctgggcaacagagggagactctgtctcaacaagaacaacaagaacaacaaacaaaaaaaattaactgggcatggtggcaggtgactataatcgtagctactcagaaggttgaggcaggagaatcgcttgaacctgggaggcggaggttgcagtgagccaagatcgagtcactgcactccagcctgggtgacagaacggactccatctcaaaaaaaaaaaaaaaaaaaaaaagtaaaaagagctgggtgcggaggcacatgcctgtagtctcagctactctggaggctgaggcagggggatcacttgagcccaggagtttaagtccaacctaggcaacatagcaacgagaccctgtctcttaaaaataaaaaaaaagataaaaagaaatgggcgagattaatttcactaacatattttatttaatccaatagatctaaaggattatcagttcaaaatgtaatcaatatattaaagatacgaatgagatgttttatatcctttttggagggagtatggaagtcttaagtccagtatgtatattttaccctttaaatagatctcaattcaggccaggcacggtggctcacgcctgtaatcccagcactttgggaggccgaggcaggtggatcacttgaggtcaggagatcgacaccagcctggacaacatggtgaaaccccatctctactaaaaatacagaaaatagccacgtctggtggcacgtgcctgtcatcccagctacttgggaggctgaggcacaaggatcacgtgaacctgggggatggaggttgcagtgagcccagactgcgccactgcactacagtttgggtgacagagtgagactccgtctcaaaactaaataaaggaagaacagatctcaatttggaatggccacatttcaagtgctcccaagtcccaagtcattgttcaccatcctgggaccctccattcatctccttctttcttttctccctgataccttccccttcctcaaagattctgtctccctgaggtgtttctccatttcaggactcttctgcttccctcttaactgctctcatgaaaggacttctgatggaccctctcgtcccacctccagcccctggcagcctatgggtggccctgcctttggtcagggcctcagcacgttcaacctgggtggagccacaggtcacacgagaccctccccttcagcagggactgtgaggaaacccttagaaggagtgtgtgcggtgcaggccccacaggtcggctgccccctaaatcctaataggactggctcagctgtgacccagaatcccctgcagaatgaatgcctgacttcagctctctcaggcagtgtagtctgttgggagccaggaaggtggggagaaggacacaggtatctctgtggaggggactccacagcagcatctgagcaaaggcaccagaaaactggagatgggcagtgataagttgcaaagagccaacagaattcccctctacccccctcactcaatttccactatttgttaactttaccaagaaactgacattggcacattgctattaactatattgattgaatatattgattgtgtgataaggggcagctgggattttccagtaccctcatccctttgtttccttactccctaccccgactccttatctggagctggaaggtctttgatgagctgaagaaagacacgggttattaaataataatgctgcgacatcttcccgcaagaggcggtcagtgttggcaagagaaaagctcgtcttccaaatgctctgaacaacctgaatgatgagctggaagaaatgtccagggcctcagaaatcaaacaccatccctctaggaaggaactgggaggaaggaaagggaggcagagagaaggtgtccacagatgcccttcccaggtggactcaaggagaagctgtggtccttcccctctcgtgaaccacaagattatgcagaactggctgattgtaggaatttctttctggaaacatgctcttcctctgtgacctcatagaagtccaagatctaagaggtccaagtacaaagaaatgacaaagggagcagaggagagcatttgatgctgttgactttttttttttgttttttatttttatttttttagatggagtctcattctgtctcccaggctggagtgcagtggtgtgatctcggctcactgcaacctccacctcccgggttcaagtgattctcctgcctcagcctcccaagtagctgggattacaggtgcctgccacttcgcctgactaacttttgtatttttggtagagacagagtttcaccatgttggccaggctgggcccttgacttttgcagtgaaataggaaataagggatgaaggtgaagaggtgagattgaggagtagaggagaaactaagatagcccatttggggaggaatcctgggaggacccaacacttgagacaaagagtttctttcacaagaaagacaaattccagcctaatcctctggaagtgtaatctgagaacatctgaagactcattctgagtgcaggagccaaggctagagcaagagcttcatctcactgctgctccatagcctgtgagtgctttgacatttggagttggacgcttctttgtgctgggggctgtgctaaacactgtaggctgtgcagcagcatccctggcctctgcccactggctgccagtagcatcctctccccaacccaaaatgtcctcagacactggcaagtatcccctgggggacaaaatcaccctttgttgaaaaccacgggtttagactcagagtctttctccttctttcctttctctcttttccttcctttttctttctttcctcctttcttccttccttagttccatcttcccttccttccttcctctttcttcctttctctttcttttttccttccttcctttctcccttcccttcccttcccatttccttttgcccctttcctttcttttttcctttctttcctttcctctttttatctgaaacaaggtctcactctattaccaagtctggagttcagtggtgtgatcatacctcactgcatcctcaagcttctgggctcaagcaatcctcccacttcagcctcctgaataggtgggactacaggtgtgcaccatcacgtccttttaattttgtagagacggagtctcaccatgtcacccaggctgatcttaaaccggcctcaagcgatcctcccatctcagacccccaagctgatgggattacaagcatgagccactgcacacagcctaaacccagagtttttttattgtgctcccagggcacaggtatgagacttacctaggtgtgattaaaaaaaaaaaatccatctacctgggcttctcctggacctactgaatcaaaatctccctggaggagacccagcaagctgcccttcaagcaggtgattcttcattaaacactctatgcctcagtttcctgaaatgggaaggataatgataacatctatctcaagggttggtatggaggttaagtgaggggattcacacattgagcacagtgtgctgaatgttagctattatcactcacattaaaggtggagaagcactggtttggagagatatgcattgagtgctcttgaagagagggaagaacaggaacccgggggcaggagagtgaacgctgctgtgataaccactctgctcaaatgccagccaagtactgtggctaatgatgagggggcacaatggggattatcccgccatcctagggctttcctccctgcagatcatcattgttcctgttgacttcatgctccagctgcctccccagctaaaacaaatactaacaactgatgatacaaggcaagaggggtgacagtggaaaaaaatgccaatctgtgtctcagttacaaataaacacaaacttagtggcttaaaacaacacacatttattatagttctggaggacagaggcccaacggacgtgaaaatcagggtgttgaaaccaacacaagtagtcccatagacagtttttttctttcttgataaacatagaaattgacctttctggtcttaactcttgaaacttaaagtttgttttatctgagttccttcctcaggagggaattccttgcctctcaaataagtatcaaagaactgaaactcaccagattacagcatccagacaatgagatgccagacccctcattcatcgggattgcttccttgcccgtcccaagttcctgttttgttacacattgttacatctcttccctgctgtataaacccttgattttagttggtcagggagatggatgtgagactgagttactggctccttggctgcaacacctgagtaaagcctccttccttagcaataattgttgtctcagtgtcggccttctgtgcagtgagcagcaggacctagacgaatcccctggtgttttggtaacagtgtcagcaggattgcctgtccttcttggggctctaaggaagaatgagtttccttgccttttctagcttctacattccttggccacctacattccttggcttatggccccttgcttcatgttcaaagccagcaatggtgaatggtgaaaggctggctctgcccctgcctggctctgcccctgcctggctttgtgcccctggacaagttatttaaattctctgagtttccactttaaaaaatttcccttgtgggcctggcacagtggctcatgcctgtaatcccagcactttgggaggccgaggcgggcagatcacgaggtcaggagatcaagaccatcctggctaacatggtgaaaccccgtctctactaaaaataaaaaaaattagccgggcgtggtggcgggcgcctgtagtcccagctactcgggaggctgaggcaggagaatggcgtgaacccgggaggcggagcttgtagtgagccaagatcgcaccactgcactccaggctgggtgacagagcaagactgtctcaaaaaaaaaaaaaaatttcccttgtaaagtgggtctattaatccttagcttgtaatatttgttcatttcataatagctagttgtgtggctggtaagtgagttatgtaactttcccaatcctcagtcttcattacctgttaactggggataataatagagggtacccttggatgcagtgaggattgaatgacagatcgtatataaggctcttaatgtggtgcctggtacatcataaggacagtgaggacttggtgaatgtcagttatcacaatcactgtctctatcctcaccataatcactatcactatcataatcatcaccactatcaccattatctttaccatcaccatcaccactatcactatcaccaccatcactgtcattatcaccatcactagcacatcactgtcatcgtcaccattatcactatcaccattatcaccatcattactatccccaccatcaccatcaccatcatcacgatcactgtcatcatcaccatcaccaccatcattaccacccctttcatcatcaccatcaccactatcaccaccaccaccaccatcaacatcactatcatcatcattgccaccaccaccatcaccaccatcaacaaaagaaaaagcagccaaactcagaattccacatcagctggaactagggttggggaagcacagaggacattagcccatgggaattctttgccccaacttcacctccctcccagaactcccttggctgggaatatcccacctcatacaccatcccattctgtgccctcttggaagatgagaagcaccaaaggtcttgtgtcccacctgcaatgtccacaaatactaatattaggcttagagaagagaaatgagaagagtgatattaagataataaaagtaggccaggcgcggtggctcacgcctgtaatcccagcacttcgggaggccgaggtgggcagatcacgaggtcaggagattgaaaccatcctggctaacatggtgaaaccccacctctactaaaaaatacaaaaaattagccaggcgtggtggcagatgcctgtagtcccagctacttgggaggctgaggcaggagaatggtgtgaacccgggaggcggagcttgtagtgagccaagatcatgccactgcactccagcctgggtgacagagcgagactctgtctcaaaaaacaaaaaacaaaaaacttagctgggcatggtggtgcacgcctacagtcccagctacttgggaggctgaggcaggagaatcgcttgaacccaggaggtggagatcacgccactgcactccagcctggcaacaggcaacagagcgaaactccgtctcaaacaacaacaataataataataataataaaagtaaattaggccgggcgtgatggctcacacctgtaatcccagcactttggaaggccgaggtaggcggatcacttgaggtcaggagttcgagaccagcttggccaacgtggtgaaaccccacctttactaaaaatacaaaaattagccaggggtggtggcgcatgctgtaatcccagctactctggaggctgaggcacaagaatcacttaaacccgggaggcagagattgcagtgagctgagatcgagccactgcactccagcctgggcaacagagcaagactccttctcaaaaaaaaaaaaaaaaaaaaaaaagataaaaaaaaggaaatttaccaacatttcttgagccttttaaaacttttttaaggctccaataagatcattaagtcctttctggaataaggagaggtagtaataaacaaattctttgttgctttcaaatcagtttatgcgttactcaagaaaagcagttaaaataactttacattaaatttcatttgatcaaccactttattcaaacaccttggcccagaatgactttggttattccaaaaagcaaactccgtctaaggcaaagttttatcacattaaggatattcacaagactttgccacagattgggactgcagttcccaggtgggacttccagaaagattgcatttgaattacgtgtgtgttatttccagggtgagactttgaaagagatgacacaagagttccggcaaattatttaacaaattgtaatgtcattttacattactcagtgtcctctccccaacacttcaaagtgaccttcaatgaatcaccaaaccatgctgtcatatttcttccaatgacaagcagaagggctccgattgctttctaaggccctttgggaccatatgagagaataaagtatatacttcctaattcaaagcaaatcattagggctgtggaattaaaattgtggaaattgataaacctataataacaacaattgcccggttaaaattgcataaacaacaaatctttttcggcacttctgtaggttcattctgttactcaaggtccatttgttctgaaatatcccccatccctgcaatctcagaatgagttcatgaaaacagacaattataaatctatcctgagctatgattcatgcatcttaaccgactccctaattcttccaatttacaaaccaattcagaagtcagtcaagggcccaggtcacgcaaggatggttagaggagcagatggagctgcttaaaaccatgtgcttggcggggttaaaatgatgagaatccagaggaaaataaattgggcctgtctaaagtaatatttcagtttttaaaaactgcttagcctgaaaatcatgtgcctcatttaattccctgcaggctggaaatttgacaggagagataaattgcaccaggaacattattttcattcagaaaggtaagcccaagaaatagggtgggatatatcctcatctgaatgagggtggtctgcggaggggggacgcagggaagagcagccaggggaaaaacaggatgtgtgcaggcgtgaacggctccagttcaatgtgaagtcagagggagagtcagatcatggcagaagaaggaaggaagcaaatctggaagcattcatgtcggactgaaaatccacaccagaagggagatgtggctctaaacagggatctcaagcacaaaggcaaagcatcagtactggaaatccttaggggatttaaaaaaagattaaaatgcatactctgttcagatttccttgtttttccgccaatgttctttttccattccaggatcccatcgaggacagtgcatgacattcagtccttgtgtcttcttagactcttctacactgtgacagtttctcaggtgcagtagcatgatctcagctcactgcaacctccgcctcctgggttcaagcgattctcctgcctcagcctcccgagtagggggcagtacaggcatgcaccaccacgcctggctaattttgtatttttagtggagacggggtttctccatgttggtcaggctggtcttgaactcctgaactcaggtgatctgcccacctcagcctcccaaagtgctgggattacaggcatgagcccagcctgcccttgacagttttaaggggtactgcacaggtattttgtagtggaataccctttaattttgagtttttctgatggtgagacaagttgtgagtttggagagaagactgcagaggtaagtcaccattctcatcactttcttcttttttttctttttttttgagatggaatctcatattgtcactcaggctggagtgcagtggcatgatctcagctcactgcaacctccgcctcctgggttcaagcgattctcctgccttagcctcccgagtagctgggactacaggtgtgtgccaccatgcctggctagtttttgtatttttagtagagacaaggtttcgccatgttggtgaagctggtctcaaacccctgacctcaggtaatccacccgcctcagcctcccaaagtgctgggaatacaggtgtgagccatggtgcccggccaccattctcatcacttcacatccgtggtacatcccatcaagatgagttggcactgttgatgctgaccttgagcccctggctgagggagtgtctgccaggtttctccattgtaaagtttctcctttcacttcctctttggaaggaagtcactatacacagcccacacttatagggtagggagttatgagtgcttccttgagagtggagtatggtgttatttttataattaaagaaaaagatgcctgcaatggaagatgaagaggatcacctgctggtggagcaaaaatccagaacctcgtgtgtgtctcagctagaactggtggtttgggaagggtcgactgcccagcagtgcagcgggagatgcaaaacctgagggttcaagtccaaaggttgacctggctttaaaagccaatgatgtcaaaaaaacaaaaccaaaaacactgagcacaaaagctaggcaatggtgcagccagttgggatacttttcataggcactgatttttactctctctggaattcctttcaaagacacagggtctgctggtggatggtcgctcctctgcagggactggggcacatggcatggcctcctatgtcatttgggggctctttgtttattcaacatgcccgccacacaccaggcaatattctaggagctaggcatgcagaaatgaaacatccatcctcctgatgaagacagacagcaagccaaaagataaacaaacaacatcatttaggtggacagggctaggaagagagtaaaatgccattacgggggtagacagtgattgatcccggggactcctccagatagcggggtcacagaagacctctatgagaaagtggcatttgagctgccactgaatgaccagcagaagctggcctgggaagacggagggggaagaatgcttcagatagaggatccacgagtgcagaagctgtgagaggtgacaacacagtgagatcctgtctctaaaagaaagagaaaaggcagatgtgggtggagcaaaatgaggaagggaaggggtgttccaagatggagagacaggaagtggccccatgatgcccggcctataggccacactgaaaagtttggattttagtcctagtggtcaacctattgatggtatttcaattttaattttaaaaaatacaatcaggctgggcgtggtggcaggtaatcccagctacttgggaggctgaggcagtgagccaagatctcaccattgcactccagactgggcaacaagagggaaactctgtctgaaaaaaagaaagaaagaaaaaaaaaagtcactgtgtttcccatgagagtgtgatctactaagggagcaagtatagaaataggaagacctgctactgcctcaaagaattgttaaaggatcgaacgcctactaatgtgtgcaaagcctgggacatagcaggaatgcagtaaatgcaataaaagaaaatagctgcagtaagtgctatcagtaaatgcactactggactgggcgtggtggctcacgcctgtaatcccaacactttgggaggccgaggcgggaagattacttgagctcaggagttcgagaccagcctgggcaatatatcaagacctcatctctacaaaaaatacaaaaaccaaaatagccgggcatggtgggtgtgcctctggtcccagctactcgggaggctgaggtgggaggattgctcaagcccagaaggcggtggaggttacagtgagctgagatcatgccactgcaccacagcctgggtgacagagcaagaccctgtctcaaataaataaataaaaataaaaaataagaataaaaatcaataaatacactactgcacttatgcagatgaacttcacttcttccgacttagccacacacaactttccagcatcacagatctttgcagagggtgggacagccgggaaggtgctgttcgcacagaattggctgaatgaccaggtgtttgatggatgaatcccaggtagccagggcgtctctgggcacacgcacccaggatcacacctggacaagaaagtggggtctaaagtagcagtccgaggctgggtgcagtggctcatgcctgtaatcccaaaactatgggaggttgaggcaggagggttgcttgagaccaagagttgaagatcagcctgggcaacatagcaagaccccatctctacaaaattttgaaaaattagctaggtgtggtggcatatgccagtggtcccagctactcagaaggttgaggtaggaggatcacttgagcctaggagttaaaggctgcagtgggccatgatcacgccactgcactctattttgagtgacagagatcctgtctccaaaaaatacatatgccagtgcaggcctggtatgtgtcctgagagttccctgcctggcatctcttgaagtgggcaccagtaaccagaagctgaagtcctggtttggcaaaggatggaggaaaaagatattggatctggagggctgggtgcaggtggcttacacctgtaatcccagcacttggggaggccgaggtgggcagatcatgtggtcaggagatcgagaggatcctggctcatacggtgaaactccgtctctacaaaaaatacaaaaaattagccggatgagggcgggcgcctgtagtcccagctactcggaaggctgaggcaggagaatggcgtgaacccgggaggcgtagcttgcagccagccgagatcgagccactgcactgcagcctgggcgacagagcaagactccatctcaaaaaaaaagatattggatctggaatggatcgctgaaaataaaagaaaactggggtgaaaaagaagtgtacatgggataaactggaggtaatgagttatgtttgggggaagatagaaaaagttagactctgtggcgtgggaggagcagagtaaatgtcaacagtcccctcgagcctggaaaactccaccatgagtcatggaggacccacgtcagaaaatagctattttgagcccagctagaaagtttggctctgtctgcttttcctgagagtggtgagtggttgacccaggctgtaagctcttcaggtcattgcttccccaaacaaaatttcaatcaagcgagtgccatgaccctgcacagaagtccagaactaaacctcgatgtgggactgggcttgccaaaccagaaggtctgttctaagagaaagaagctggaacctgcgaggggaattttgccaatgggaggaacagcaatttctccaaaaagagggggtaggaccagcaatttcccgttcctggaaggtcccctatacattttgttcagagcatttagattctaaatgtcacagtgtgatgtcctcatgtgcaatggacatttgttgatttgcctcccagtatccattcacctttcttaggtaataggacctgtttcctttggggaaccaactggcaccaccgctcccaggacttgcaaatttaatggggcttaccctacccaggtgtggcctaaggtgctcactgtgttcccttcccgttcagattcagatagatataggatcagatacacaccagaagtagtcagacccagaactttgctgtgaacccccctgggggaaaagaaaccctgaatcctaagaacaaagccctcatggaggggataaaagctgagggataaacagatagactttggactcctgcctcaaccacccctagagtgtagaaaccccggttagtacattcctttttttttttttttttttttgcatatgcagtttgggttgagttttctgttgcacaaaaccaagaaagtcacacaaatactatatatctttgttttttttttttttgagacggagtctcgctctgttgcccaggctggagtgcagtggcgcgatctcggttcacgccattctcctgcctcagcctccggggtacctgggaccacagacacccaccaccacgcccagctaatttttgtattttttttttttttttagtagagatggggtttcactgtgttagccaggacggtcttgctctcctgacctcgtgatccacccgcctcggcctcccaaagtgctgggattacagatgtgggccaccgcgcccagccccacaaatactatgtatcttttaagagaaacgcatgatgagaagcagcagggggtcaacatgcatctggggtgttagaacccaagaggcagtagacagtcatcttgtacctcccctgcctgctgtcagaatgctaatgcactgtctcctaaagcagggtatgaaaaatatggccccaaggccatctccagcccatcacttctttttgtgcagcctgtgagacaagaatggcttttacatttgtgaatatttggacggggggcaaggggtcagcgtggaatcaaatgaaaactgcaaaaaattcagatttcagcatctataaataaagctttattagaacacatccatgcccatttgtttaggtactgttgatgactgcttttgtgttacagcagggctgagtagctgggacagagaccatactgtcagaagcgtttgaaccagaacaacaccatcttgaataggggctgggtaaaatgaggcggagacctattgggctgcattcccaggaggttaggcattctaagtcacaggatgagctaggaggacggcacaagatacaggtcacaaagacctgaccgataaaacaggttgcggtaaagaagctggccaaaagccaccaaaaccaagagggcaacgcacatgatctctggtcatcctcactactcattccacactaattataatgcattaccatgctaaaagacccgcccaccagcgccaggactgtttacaaatgccatggcaatgtcagttaccttatatagtcttaaaagtggaggaaccctcagctgtgggaattgcccacctctttcccagaaaactcatgaataattcgccccttgtttagcatataatttagaaaaaactgttaagcattatgagttgagcagtccaagctgctgttctggctgtggagtagccattcttttatttctttactttcttaataacttaagaaacttaataaataaacttgctttcattttactctatggattcgccttgagttctttcttgcacaatatctaagaatcctctcttggggtctggatcgggacccctttcctttaacaatatggccctcaaagacaaaaatatttaccatgagtcctttaagcaaaggttcacagactcctgccctaaaagatactgtaattctaagacatccaggaaagagacattctgtaacttgtcttttataaactaagatattaaaggctttaaatttcaatcttatgctggcaaacttgataaaacaattggtttttcctgctaggtaagatggcaagaattgctattattttatataaggctgtttagaagaaacccttactaaagcttttaaggttataaatcaaaagtaccgtctagaattcaaataatatgaattcaaattatagaattcaagggcaatagcaatgatatattcaatcttagtaatggttattcagccctattttcccattatcatagaaattcccttttaaacatcttctatattttgaataatctgaaaaacaatctgtcataatgaaatgaactttacagtaataataatagctatttgttaaatctttactatttgccaggcagagttctgagcattttacttacattaacacatttaatggctccaaccatgctgtcaggtaagtaatattattatacccattttgtagatgacaaaacgaaggcacagagacaggttaagtaatttgcctaagatcacacagcaaatattggggccaggattcaaaccccagtaatctagacccagaaactgaactatgctaggggttagaccatctcagatttatttaaaagaggtggaaatgacaataatatttcactatagtttagaatttaattgatatcactgtgtaacatacacctttttttccctcagaagtatttctggaccactaacacgatcatgttgatacaatggaactcacatcccctctccatatttgattggatcaggtgtcaacatctggcccaagctggaccaataggctccttccctgagcttttggtgctgagattaagattccagtctcaacctgacttctgtcactctcccatgagatagaagaatagaggagacatggagaaaaacagtcaagaggtagaggtggtgggagggacctccttgattcacaatggactctatccccttcctgaattccagtggaaccatggccctgtgttctgtgagacaccctagaatccttcaacaatatccacttttggctgaacccagtgggttttggtcacctagaaccaaaagaatcctcaaacgtaacccgattaagagcaaaacaacctggctttttttttttttttttgagatggagtcttgctctgttgcccaggctggagtatagtggcacgatctcggctcactgcagtctctgcctcccaagttccagcgattgtgccaccacacctggctaatttttgtatttttagtagagacaaggtttcaccatgttggccagcctggtcttgaactcctgacctcaggtgatccacccacctcagtctcccaaagtgctaggattacaggcatgagccactacacctggccaacctgccattttatatattctctgagtcatcagcatgggcctctcaaatgatggacttgctggatttctgtttatttcctttgctgtgcactaagtaggtcagctcccaagaatgactagtttggagatggagggactagtggaatatgcttagaatggtgcctaagccaagctgggaaccaacaaattggttttgggctctactttagtttttcttgttgttgtttgtttgctttttttttttggcctgggggggaaaaaacccacaaatgtctttccccagtttcctccagtaacacagatggaaatagtagtttatacttgggatggtgctcggggaaatagtgtctcagaaccaattactgaaatgaccagaatggatataaaatgtggctgcataatttcctaagtcccatttctcagggtaaaaatggttcagaccatccaaatgcttctccgaagaaattacacaagcgagatggaaaaagaaagtattggtttctcagcgctggtaataattaggacttgaatgagtggtgataaacccatttacagacaggaagtgtgaaggcctgaatggccaggagatttgctaagtgatgacaagatcaagatcaggcctctggcctctgagcccagctccctaagcctagtgaactttgaatgacacctgattttttgccccatccagcacccattttctgaatgcaatttggaggaatgaacatacgacccagaacctggccaatcagaatattctaccgccacctcttcccctctcccccaccatggtaatcagttcagccatgggcaaattatccaagttgaggcaataatactcagtcccatgacttccattgaaacttctaatgaaacgatctctctctgttgggattgctacctgatggctaatgtaagcttagagccactgggattgccatatggaaagcatctgcctgagagtgaagccaacacaagtagatgcagaaaaactgagtcctactgatggcatttgatcccttggatccagccacgctggatatgggatatgggaaaccttgaagtacagtgactactgtggataaggggtcaatgggtaagtggtttccttgtgggatgatgaaaatgtttggcatctagaggtgatggttgcacaagactgtgaatgtacataaagccactgaagggtacactttaaaatgatgaatgctatgttatgtgaatttcgccttctttttttaaaaaaggggaaagaggccaggtgcggtggctcacgcctgtaatctcagcactttgggaggccaaggtgggcagattacctgaggtcaggagctcgagaccagcctggccaatatggtgaaaccctgtctctactaaaaatacaaaaattagccgggtgtggcggtgtgtgcctgtagtcccagctatttgggaggctaaggcaggagaatcgcttgaacccaggaggcgaagtttgcagtgagttgagattgcaccactgcactcctgcctgggcagcagagcgagactctttctcaaaaaaaaaaaagaggttgggggaagagcataattttaaccacgcagatatcagagatttcacaaaaggagtgtcactgaagctagatatggtggtcaagaggcaggagaagggggagatgctttctaggcctaataacaaggtgctaagcccttttgatgtggtctgaacatctgttccctccaaatctcatgttaaaatttgatccccagtgttggaagtggggcctgttgagaggtgtttggatgatgggagcagatccctcgtgaatggcttcatgccatgtttgcaggattgagtgagttctcacccttaattcccaagagatctggctgttaaagaagctggcatcttcctcttttctcttcctctctcttgacatgtgatgtctgttccccttcaccttccacagtgattgtaagattcttgggcccctcaccagaatcagatgctggcaccatgtttcttgtataacctgcagaactatgagccaaataaacctcttttatttataaattacccaacctccggtattcctttacagcaacatgaaatggactaagatacctctacctacagtaattacatcgttaatcctcacagcaacccttgaggtagtaaatattactttagccttgttttataggtaagtatgcaagggccagaaaggggacataacttgcccaagtttacatagttgtagatcagcagagagctgggactcaaacatagatttttctggccaggcacggtggctcatgcctgtaatcctagcactttgggaggccgaggcgagtggatcacctgaggtcaagagttcgagaccagcctggccaacatggggaaacctcatctctaataaaactacaaaaattggccaggtatggtggtggacatctataaccccagctacttgagaggctgaggcaggagaatcacttgaacccaggaggcagaggttgcagtgagctgagatcatgccattgcactccagcctgggcttcagagagaaactctgtctcaaaaataaataaataaataaaaataggtttttacaactctcaaccactccgttcaagtgcctcctagtagagggaagagcatagaaacacagaacatttctttagaagaatgtatcattccatgttcttcctagaggaataatcggagtttagcccactaagataactcacaacagcaacctttataacagtggaaaaattggaaacatacaatgtttggccatatggactagttaagttattgaagaatatgtgatgatttgggactaggatcataatttagagctgagtgaaaaaggcaggatatgggaaagtaaaatagttggatattagctacacaggaaaaatattaaaaggttactagaaaaacacgcatcaggatgttggttgactttggcgggtagaattgtgggtgatttttttctatgtgttttacgcgcgtgtgtgtgtgtatagactcagtttccatatctgtaaaatgggtataataacagatctcccccactgaatggtcagaaacactaagtgagacaacgcatgtaaagctt

SEQ ID NO: 285 - DNA, 149480 bp, Homo sapiens; identical to SEQ ID NO: 284

SEQ ID NO: 286 - DNA, 412 bp, Homo sapiens
  misc_feature (1)...(412): n=a,t,g or c
tataacttaaaatcgtttattttaaaggaaactttaaataaccaatggaaatgaaaaaccagccccacttgccatgaacagccccaactgttcggatttcattcgggcaggcggggtccacaagaggctctcttggcttaaagggagcccagcttggncangatcaggtgttaaggacacgtgagcaccaaattgagcctttctcagtgatgaggtcaaaaaatgaaagcgcgcaggaagggttctccccaggggaattctggggtgtcccaangtcatccggggccccgcacgcttcgggccatgctgttctggtctccagccctcatggccgtggcaattggacagcgtcaacttcctcactcagtgtgttcgcatcctgaccttgaggtnggggtgagggggacattga

SEQ ID NO: 287 - DNA, 263 bp, Homo sapiens
  misc_feature (1)...(263): n=a,t,g or c
gtttccaattgcagatttatttccacacacacaaaaaaaatctatgttgaagttacaggattgccatgaatgccacacacctttcagactaagcagaaagcccacaagaaaagcacaaaatgaatgcactcagctgcccctgtcccccccaccctgggtgactggggaaggacaggcagagcatcctaacaggggagctgagtctttgggaggataggaaaagcccaggggtcagggnaaaccacacagaccntacanggggg

SEQ ID NO: 288 - DNA, 437 bp, Homo sapiens
ttttttttttattttcataacttgcttctgttgattttttttttttgtaaaactttcccaagacattttcagacttaaaaataaagtcagtgttacaggtgctggtcagccttcttacttgtacctcaaacactgggataaaggaggcggtccagggcaatgcagtgatgtctgtcaagacattccccctcccctaaactcagtagcagttgaggatgacatttcaggctagagagacccaaaatacctctgttccacctgagagcaaggtggaagttgcatcagctactgccccaagtgagcttcatcttctgattgtgggctttggaggaacgagagaactggctcttgggcactgtggaggggtacagctttgccactcaaatataccttattgtgggcattcagggagccagggtccagagctgcagggctgc

SEQ ID NO: 289 - DNA, 352 bp, Homo sapiens
aatgatttgtatattttattttgactttacatgcggtgttaaaaacccaaagtacatattatttacacatccacaatacaagtttacaaggtatctattcatgttaaagtactctataaaacagtatagagacacttcacttcgagggttactttttatgccgtaccattaaaaaagatacaatctgcgtttacctttgcacaaatggataaagcatttaaaaattaaattaacaggatagagactagatttaatgttagaaatttcaacataaatactgattgaactcacattacaaactacaaggaagcacaatgttacaaaatgttatctggggtcacatagagttact

SEQ ID NO: 290 - DNA, 445 bp, Homo sapiens
gaacgttaatatttttatttcttttgtaatgaagagtacaaatggttgggagcaggacatcacaggaggaggaaagatagcgccatctctgcagaagaactcctgagccacacacagaaggaaagttgatccccagggcagcctttcccaccaaaaaaatcaggcccaatccaggagagtttgccagtagctccccagggttccagggtgtctgccagccttcctaggaatcgtgggcaggcttctaggtgccagtgactcaaactccttttcccacttcccagttcaacctggtcactctcatccccacaagttcccaatctgaatcccattctctgaccattctctgcttccttgtttttaatctcatttgagagtgatcctcacgggttcccctggcccctgcactcattttccttactgggtatgctaacgttcctcgtgc

SEQ ID NO: 291 - DNA, 425 bp, Homo sapiens
aatatgccacaatttttattgcaacgtggccatttttgtgagggtggggagtttgatctcaaaacaatgttccatttaaggctcttttatacagaaattgccatcatgactgatattcaaaatatctttagtgttgcaggactcacatggtaaacataaaactcctacacttattcagtagtgtacactcaatggaaaacaaaaaggcattaataacagctatttcttttaagaagatatgcaggtaacaggaatgaacactgaggtactaggataagttgatgacacagttaacaaaacttaattggcattccttttaggatattaaacttattacaaaaagtgcttttaatgcatagtgttatatccgtgctgccatatcactaaaataggcttgccaaggcagggtgaggtgtatgaatgcg

SEQ ID NO: 292 - DNA, 566 bp, Homo sapiens
  misc_feature (1)...(566): n=a,t,g or c
tcctctccgcgaactngcaccaactttatttgcaaaaagaggctccaagcgcacggagaggatgggggctgcaaggtccccaccctcctcccggcctcccgcggctcctgccctcctccaggccccccacggcccccgccccgcnagctacacgatcccgaactnggcacnctntanggcagctgatcgcggcagctntgctcgaaccacttgccgttggcgcgcctgacaggaccgcgcagttctcggtcttgccgccatcgggttgcgcggtgatctcagtctcccagttcttgtaggcgatgcgggcgccggtcatgtccacccaggtgccctcggncgccatgtcgttgaggcccagccagatctcggcctcgttgcccacgctctggcgcaggtactcatacagggcgtcgttctccgagccagtctgaggggtgctcagggtgccccgcgcgagatgcagttctcgctgggctcgtggaangtcttcgtctgggtgaaggcagaaagcattttatgtgnactttgggtcccnttnagggaanacgtttgaagggctgctg

SEQ ID NO: 293 - DNA, 461 bp, Homo sapiens
  misc_feature (1)...(461): n=a,t,g or c
caaataagtaaaacattatcaatgtttccgttttaaattaccatgtattaacaatattaactttaatatatttttcactttttcctaatttgtacctttatagttgactattgcagtttttaatattttcacaaaaaaatgtaaaggtcacagaataataatttcccttcactgatgattaacattgctttgcagagtctcagcagcatggtcatttttatggctccacattaccatgcaaagaaggactgcctgcattttgaaatacatattaaatagctgtggcatactgctgaaatacacattaaatagctgtggcatactgctgaaatacacattaaatnagctgtggcatactgctgaaatacacattaaatagctgtggcatactgctgaaatacacattaaatagctgtggcatactgctgaaatacacattaaatagctgtggcatactgctn

SEQ ID NO: 294 - DNA, 406 bp, Homo sapiens
cactaggaaacaaaggatattttattccttttttctgttgttgttgaggatagatcacgatacagagaacagcaatgggtcacagcgcacggtttggttggtttccgcgggaacacagaggacaggaggggcgggatctgggttgagttcccactctcgttatgaccttcaacctctcactgttcccaagggctgcacggagcctgctgagtctccaacccacctcgctcaccgctctgaccaccgacagcacgagaaacggatgcgggagttgcctctgctgcccatctaaggggacgtaggcagagaagcaaaggcctctgctctccctccatccatcccggtgtgctggccccaacggaacaggagtccttcaactattgcctgccagagacccaattgcagg

SEQ ID NO: 295 - DNA, 5180 bp, Homo sapiens
accgggagcgcgcgctctgatccgaggagaccccgcgctcccgcagccatgggcaccgggggccggcggggggcggcggccgcgccgctgctggtggcggtggccgcgctgctactgggcgccgcgggccacctgtaccccggagaggtgtgtcccggcatggatatccggaacaacctcactaggttgcatgagctggagaattgctctgtcatcgaaggacacttgcagatactcttgatgttcaaaacgaggcccgaagatttccgagacctcagtttccccaaactcatcatgatcactgattacttgctgctcttccgggtctatgggctcgagagcctgaaggacctgttccccaacctcacggtcatccggggatcacgactgttctttaactacgcgctggtcatcttcgagatggttcacctcaaggaactcggcctctacaacctgatgaacatcacccggggttctgtccgcatcgagaagaacaatgagctctgttacttggccactatcgactggtcccgtatcctggattccgtggaggataattacatcgtgttgaacaaagatgacaacgaggagtgtggagacatctgtccgggtaccgcgaagggcaagaccaactgccccgccaccgtcatcaacgggcagtttgtcgaacgatgttggactcatagtcactgccagaaagtttgcccgaccatctgtaagtcacacggctgcaccgccgaaggcctctgttgccacagcgagtgcctgggcaactgttctcagcccgacgaccccaccaagtgcgtggcctgccgcaacttctacctggacggcaggtgtgtggagacctgcccgcccccgtactaccacttccaggactggcgctgtgtgaacttcagcttctgccaggacctgcaccacaaatgcaagaactcgcggaggcagggctgccaccagtacgtcattcacaacaacaagtgcatccctgagtgtccctccgggtacacgatgaattccagcaacttgctgtgcaccccatgcctgggtccctgtcccaaggtgtgccacctcctagaaggcgagaagaccatcgactcggtgacgtctgcccaggagctccgaggatgcaccgtcatcaacgggagtctgatcatcaacattcgaggaggcaacaatctggcagctgagctagaagccaacctcggcctcattgaagaaatttcagggtatctaaaaatccgccgatcctacgctctggtgtcactttccttcttccggaagttacgtctgattcgaggagagaccttggaaattgggaactactccttctatgccttggacaaccagaacctaaggcagctctgggactggagcaaacacaacctcaccatcactcaggggaaactcttcttccactataaccccaaactctgcttgtcagaaatccacaagatggaagaagtttcaggaaccaaggggcgccaggagagaaacgacattgccctgaagaccaatggggaccaggcatcctgtgaaaatgagttacttaaattttcttacattcggacatcttttgacaagatcttgctgagatgggagccgtactggccccccgacttccgagacctcttggggttcatgctgttctacaaagaggccccttatcagaatgtgacggagttcgacgggcaggatgcatgtggttccaacagttggacggtggtagacattgacccacccctgaggtccaacgaccccaaatcacagaaccacccagggtggctgatgcggggtctcaagccctggacccagtatgccatctttgtgaagaccctggtcaccttttcggatgaacgccggacctatggggccaagagtgacatcatttatgtccagacagatgccaccaacccctctgtgcccctggatccaatctcagtgtctaactcatcatcccagattattctgaagtggaaaccaccctccgaccccaatggcaacatcacccactacctggttttctgggagaggcaggcggaagacagtgagctgttcgagctggattattgcctcaaagggctgaagctgccctcgaggacctggtctccaccattcgagtctgaagattctcagaagcacaaccagagtgagtatgaggattcggccggcgaatgctgctcctgtccaaagacagactctcagatcctgaaggagctggaggagtcctcgtttaggaagacgtttgaggattacctgcacaacgtggttttcgtccccaggccatctcggaaacgcaggtcccttggcgatgttgggaatgtgacggtggccgtgcccacggtggcagctttccccaacacttcctcgaccagcgtgcccacgagtccggaggagcacaggccttttgagaaggtggtgaacaaggagtcgctggtcatctccggcttgcgacacttcacgggctatcgcatcgagctgcaggcttgcaaccaggacacccctgaggaacggtgcagtgtggcagcctacgtcagtgcgaggaccatgcctgaagccaaggctgatgacattgttggccctgtgacgcatgaaatctttgagaacaacgtcgtccacttgatgtggcaggagccgaaggagcccaatggtctgatcgtgctgtatgaagtgagttatcggcgatatggtgatgaggagctgcatctctgcgtctcccgcaagcacttcgctctggaacggggctgcaggctgcgtgggctgtcaccggggaactacagcgtgcgaatccgggccacctcccttgcgggcaacggctcttggacggaacccacctatttctacgtgacagactatttagacgtcccgtcaaatattgcaaaaattatcatcggccccctcatctttgtctttctcttcagtgttgtgattggaagtatttatctattcctgagaaagaggcagccagatgggccgctgggaccgctttacgcttcttcaaaccctgagtatctcagtgccagtgatgtgtttccatgctctgtgtacgtgccggacgagtgggaggtgtctcgagagaagatcaccctccttcgagagctggggcagggctccttcggcatggtgtatgagggcaatgccagggacatcatcaagggtgaggcagagacccgcgtggcggtgaagacggtcaacgagtcagccagtctccgagagcggattgagttcctcaatgaggcctcggtcatgaagggcttcacctgccatcacgtggtgcgcctcctgggagtggtgtccaagggccagcccacgctggtggtgatggagctgatggctcacggagacctgaagagctacctccgttctctgcggccagaggctgagaataatcctggccgccctccccctacccttcaagagatgattcagatggcggcagagattgctgacgggatggcctacctgaacgccaagaagtttgtgcatcgggacctggcagcgagaaactgcatggtcgcccatgattttactgtcaaaattggagactttggaatgaccagagacatctatgaaacggattactaccggaaagggggcaagggtctgctccctgtacggtggatggcaccggagtccctgaaggatggggtcttcaccacttcttctgacatgtggtcctttggcgtggtcctttgggaaatcaccagcttggcagaacagccttaccaaggcctgtctaatgaacaggtgttgaaatttgtcatggatggagggtatctggatcaacccgacaactgtccagagagagtcactgacctcatgcgcatgtgctggcaattcaaccccaacatgaggccaaccttcctggagattgtcaacctgctcaaggacgacctgcaccccagctttccagaggtgtcgttcttccacagcgaggagaacaaggctcccgagagtgaggagctggagatggagtttgaggacatggagaatgtgcccctggaccgttcctcgcactgtcagagggaggaggcggggggccgggatggagggtcctcgctgggtttcaagcggagctacgaggaacacatcccttacacacacatgaacggaggcaagaaaaacgggcggattctgaccttgcctcggtccaatccttcctaacagtgcctaccgtggcgggggcgggcaggggttcccattttcgctttcctctggtttgaaagcctctggaaaactcaggattctcacgactctaccatgtccaatggagttcagagatcgttcctatacatttctgttcatcttaaggtggactcgtttggttaccaatttaactagtcctgcagaggatttaactgtgaacctggagggcaaggggtttccacagttgctgctcctttggggcaacgacggtttcaaaccaggattttgtgttttttcgttccccccacccgcccccagcagatggaaagaaagcacctgtttttacaaattctttttttttttttttttttttgctggtgtctgagcttcagtataaaagacaaaacttcctgtttgtggaacaaaagttcgaaagaaaaaacaaaacaaaaacacccagccctgttccaggagaatttcaagttttacaggttgagcttcaagatggtttttttggttttttttttttctctcatccaggctgaaggattttttttttctttacaaaatgagttcctcaaattgaccaatagctgctgctttcatattttggataagggtctgtggtcccggcgtgtgctcacgtgtgtatgcacgtgtgtgtgtccattagacacggctgacgtgtgtgcaaagtatccatgcggagttgatgctttgggaattggctcatgaaggttcttctcaagggtgcgagctcatccccctctctccttccttcttattgactgggagactgtgctctcgacagattcttcttgtgtcagaagtctagcctcaggtttctaccctcccttcacattggtggccaagggaggagcatttcatttggagtgattatgaatcttttcaagaccaaaccaagctaggacattaaaaaaaaaaaaaagaaaaagaaagaaaaaacaaaatggaaaaaggaaaaaaaaaaagaactgagatgacagagttttgagaatatatttgtaccatattta

SEQ ID NO: 296 - DNA, 2532 bp, Homo sapiens
agtgcactcaagcagagaagaaatccacaaagactcaccagtctgctggtgggcagagaagacagaaacgacatgagcacagcaggaaaagtaatcaaatgcaaagcagctgtgctatgggaggtaaagaaacccttttccattgaggatgtggaggttgcacctcctaaggcttatgaagttcgcattaagatggtggctgtaggaatctgtcgcacagatgaccacgtggttagtggcaacctggtgaccccccttcctgtgattttaggccatgaggcagccggcatcgtggagagtgttggagaaggggtgactacagtcaaaccaggtgataaagtcatcccgctctttactcctcagtgtggaaaatgcagagtttgtaaaaacccggagagcaactactgcttgaaaaatgatctaggcaatcctcgggggaccctgcaggatggcaccaggaggttcacctgcagggggaagcccattcaccacttccttggcaccagcaccttctcccagtacacggtggtggatgagaatgcagtggccaaaattgatgcagcctcgcccctggagaaagtctgcctcattggctgtggattctcgactggttatgggtctgcagttaacgttgccaaggtcaccccaggctctacctgtgctgtgtttggcctgggaggggtcggcctatctgctgttatgggctgtaaagcagctggagcagccagaatcattgcggtggacatcaacaaggacaaatttgcaaaggccaaagagttgggtgccactgaatgcatcaaccctcaagactacaagaaacccatccaggaagtgctaaaggaaatgactgatggaggtgtggatttttcgtttgaagtcatcggtcggcttgacaccatgatggcttccctgttatgttgtcatgaggcatgtggcacaagcgtcatcgtaggggtacctcctgcttcccagaacctctcaataaaccctatgctgctactgactggacgcacctggaagggggctgtttatggtggctttaagagtaaagaaggtatcccaaaacttgtggctgattttatggctaagaagttttcactggatgcgttaataacccatgttttaccttttgaaaaaataaatgaaggatttgacctgcttcactctgggaaaagtatccgtaccgtcctgacgttttgaggcaatagagatgccttcccctgtagcagtcttcagcctcctctaccctacgagatctggagcaacagctaggaaatatcattaattcagctcttcagagatgttatcaataaattacacatgggggctttccaaagaaatggaaattgatgggaaattatttttcaggaaaatttaaaattcaagtcagaagtaaataaagtgttgaacatcagctggggaattgaagccaacaaaccttccttcttaaccattctactgtgtcacctttgccattgaggaaaaatattcctgtgacttcttgcatttttggtatcttcataatctttagtcatcgaatcccagtggaggggacccttttacttgccctgaacatacacatgctgggccattgtgattgaagtcttctaactctgtctcagttttcactgtcgacattttcctttttctaataaaaatgtaccaaatccctggggtaaaagctagggtaaggtaaaggatagactcacatttacaagtagtgaaggtccaagagttctaaatacaggaaatttcttaggaactcaaataaaatgcccacattttactacagtaaatggcagtgtttttatgacttttatactatttctttatggtcgatatacaattgattttttaaaataatagcagatttcttgcttcatatgacaaagcctcaattactaattgtaaaaactgaactattcccagaatcatgttcaaaaaatctgtaattttgctgatgaaagtgcttcattgactaaacagtattagtttgtggctataaatgattatttaggatgatgactgaaaatgtgtataagtaattaaaagtaatatggtggctttaagtgtagagatgggatggcaaatgctgtgaatgcagaatgtaaaattggtaactaagaaatggcacaaacaccttaagcaatatattttcctagtagatatatatatacacatacatatatacacatatacaaatgtatatttttgcaaaattgttttcaatctagaacttttctattaactaccatgtcttaaaatcaagtctataatcctagcattagtttaatattttgaatatgtaaagacctgtgttaatgctttgttaatgcttttcccactctcatttgttaatgctttcccactctcaggggaaggatttgcattttgagctttatctctaaatgtgacatgcaaagattattcctggtaaaggaggtagctgtctccaaaaatgctattgttgcaatatctacattctatttcatattatgaaagaccttagacataaagtaaaatagtttatca

SEQ ID NO: 297 - DNA, 2299 bp, Homo sapiens
cgaacccccacagctggagggcgaggccagctgtacccggccccagtgccctttcgcggccacaagcggccgtcctcctggtccggtgctccggcgcctgatctaggttcatggagccggggctgtggctccttttcgggctcacagtgacctccgccgcaggattcgtgccttgctcccagtctggggatgctggcaggcgcggcgtgtcccaggcccccactgcagccagatctgagggggactgtgaagagactgtggctggccctggcgaggagactgtggctggccctggcgaggggactgtggccccgacagcactgcagggtccaagccctggaagccctgggcaggagcaggcggccgagggggcccctgagcaccaccgatccaggcgctgcacgtgcttcacctacaaggacaaggagtgtgtctactattgccacctggacatcatttggatcaacactcccgaacagacggtgccctatggactgtccaactacagaggaagcttccggggcaagaggtctgcggggccacttccagggaatctgcagctctcacatcggccacacttgcgctgcgcttgtgtggggagatatgacaaggcctgcctgcacttttgcacccaaactctggacgtcagcagacaggttgaagtcaaggaccaacaaagcaagcaggctttagacctccaccatccaaagctcatgcccggcagtggactcgccctcgctccatctacctgcccccgctgcctctttcaggaaggagccccttaggaggacaggcctgcagcatcctggtctcgggaggcttctgtcattgctcacacacagttcagatttccacctctttatagacaagaagtgaatttgcctggggcagaacacccacccaaagagtccccacttaacaataccccccccccacggcaagaatgcccaaatccgaatgaccccagttttcctaatgagtaaaatgatcccagatgtgccccagagcatgacgcctgcagctccggtttcatgcaggaaattggttttggagagttttggcaagttggaaagccacttactggcttttgacatgacttctcttggagaataagtggactccaagctaactctttgcaaatgtaaacacatgtccatcttgtaataaatgcaaaatgcccgtgcagcagaagcatgcgactttcatatccttgcctagaataggctgcatggtgtatgtcagtgagggccacgaggcgtcggctttagacacagatcatagctctacaggagtttatgaatttgaagcttatgggattttggcagagaaattttcagctgtgcttgatacccaccaaaagaatgtatctcgaaagaatgaaggaagaagaaaaaaggatccttgatgtttgtgacaagaaaatgagaaagttagtatctgcaatacagagcttgttcctgttcagtgactgaccctctgtattctgtatagacaccaggccgatacacagtggagttcccaggccttgtttgcaggaagccgactgtaaagacagccccagctcaaggctattaggttgaatatttgctttcatgagtaaatgtggatctttggggaatggcttcaaaataagtcacgaacacaaattctttgtaaattatgtaaattcctgtttatataaattggcaacaacttataccgtctgacagttcaaaatctctttcagctgcgctcttcccaccgagccgagcttactgtgagtgtggagatgttatcccaccatgtaaagtcgcctgcgcaggggagggctgcccatctccccaacccagtcacagagagataggaaacggcatttgagtgggtgtccagggccccgtagagagacatttaagatggtgtatgacagagcattggccttgaccaaatgttaaatcctctgtgtgtatttcataagttattacaggtataaaagtgatgacctatcatgaggaaatgaaagtggctgatttgctggtaggattttgtacagtttagagaagcgattatttattgtgaaactgttctccactccaactcctttatgtggatctgttcaaagtagtcactgtatatacgtatagagaggtagataggtaggtagattttaaattgcattctgaatacaaactcatactccttagagcttgaattacatttttaaaatgcatatgtgctgtttggcaccgtggcaagatggtatcagagagaaacccatcaattgctcaaatactcagaaagtactgtcaaaagcctaataaaa

SEQ ID NO: 298 - DNA, 3881 bp, Homo sapiens
gctgaagtgttcgaccagcaggaggttttctcctcagcccactcgctgcatccagatcagctcaccccgcgccctttcctgcccaccaggactctgatagcccctggcagccacagcccattttgccaagatgtctagagtagccaaatatcgccggcagtgagtgaagaccccgacatcgacagcctgctgggaccctgtctcccgaggagatggaggagctggagaaggagctggacgtggtggacccagacgggagtgttcccgtggggctgcggcagagaaaccagacggagaaacagtccacgggtgtgtacaaccgggaggccatgctcaacttctgtgaaaaggagaccaagaaacttatgcagagggagatgtccatggatgaaagcaagcaagtggagaccaagacagatgccaagaatggacaggaaaggggcagagatgccagcaaaaaagccctgggccccagacggaactcagatctggggaaggagccaaagaggggtggtttaaagaaaagcttctctagagacagagatgaagctggtggcaagagtggcgagaagcccaaggaggagaagatcatccggggcattgacaagggccgggtcagggctgcagtggataagaaggaggcagggaaggatgggagaggagaggagagggcagtggccaccaagaaggaagaggagaagaaagggggtgacaggaacacaggcttgagcagggacaaggataaaaagagagaggagatgaaggaggtggccaagaaagaggatgatgagaaggtaaaaggggagcgtaggaacacagacaccagaaaagagggtgagaagatgaaaagagcaggtgggaacacagacatgaaaaaggaggatgagaaggtaaaaagaggaactgggaacacagacaccaaaaaggacgatgaaaaagtcaagaagaatgaacccttacatgaaaaggaagccaaggatgacagcaagaccaaaacacccgagaaacagacgcccagtggccccaccaagccctctgaaggaccggccaaggtggaggaggaggcagctcccagcatatttgatgagcctctggagagagtgaagaacaatgaccccgagatgactgaggtgaacgtcaacaactcagactgcatcacaaatgagatcttggtccggtttactgaggctctggagttcaacactgtggttaagctgttcgccttggccaacacgcgagccgatgaccacgtggcctttgccattgccatcatgctcaaggccaacaagaccatcaccagcctcaacctggactccaaccacatcacaggcaaaggcatcctggccatcttccgggccctcctccagaacaacacgctgaccgagctccgcttccacaaccagcgacacatctgtggaggcaagacggagatggagatcgccaagctgctgaaggagaatacctccctgctcaagctgggctaccattttgagctggccgggccccgaatgactgtcaccaatctgctcagccgcaacatggacaagcagagacaaaagcggctgcaggagcaaaggcaggcacaggaagccaagggagagaagaaggatctgctggaggtacccaaggccggggccgtggctaagggctccccaaaaccttcacctcaaccatctccaaagccctctccaaagaactcacccaaaaaagggggtgctccagctgccccaccaccccctccccctcccttggctccaccccttatcatggagaacctgaagaattcactctcaccagctacccagaggaagatgggagacaaagtcctccctgcccaggagaagaactcccgtgaccagctattggctgccatccgctccagcaacctcaagcagctcaagaaggtggaagtgcccaaactgcttcagtaggaccaggctgccaggcaccatctgccaatgccatgactgctcaggcctcacctcccagggctacacagaccctgcccaccccatccctggctgacctgctgtggatgtccctattctgccatgggagcgtccaggcctgggtcacgctcaaggaaggatgccttatctcttctcactttccttttcttgtctctgaggctctccaaattttgctttagtacatggagctcaggtttctggacaagaagagtccttttagcacatcactgagaagatggcactgtccagggcccatgtagctggcaagctgcaaaaggcctgtgatccaggaaagatgtcccacagggaccacatccaccccagccccactgccctccagggccaggattcaggcctctgaggagcccacggggcaaagctgctgggccagtggcactctgtgtgggaaaatggcagaaagatggagaggcatgggggcccaaaggggagcgtggggaggggctgaggataccccaaagtccaggctaattagaggatgtggcaggggcagtggcctggatgcacagtgcctgatgggagtaggctccagacaggaggagtgggacagacagcagctggacttgaaggtttgatgccaaagcagacattttcctcacacccacctgctgctgtatgaatagctgtgtatctgtttttccataagattttgataatatatacaaacctttagctgtgaatggctgtgccccacctgttgtcctgaactgtgagtcctgatcctaaccctgggctccctggaggactctagaagctcaggttccctgccacactatttgagttggccaagaaataaattcacatcctcagaaagtgcagcatggaggaaaatctgaactctaagcagaagactctccactgacctggttgtccaggtctagaaggccaggcctctactaggtctgctcctgaaccagtcctgctgcctggagtcagtagccagagttgttctcaggggtgctggggcagagtggagcccagggtgctgggatggctatattaggcatgttcagggatgctcattccatgactctgcctaaccatgggctcagggccaggtcctcacagcagtcacaggcccaggaaggcggcaggcagagaagtggagtgactatttggagaatagcacccatatctgtgtgccctagggctcagaggggcctcatcttccccagccctccccacctgctcaccaattccacttcctgccccaactgcaggaatgctgacaatgctgccatgcccaccatcgggtgtaggtgaaaggcatctttctgaatttcattctcttgaaggtgctgccaccccttggcactgtggaactgccaccttgggtctgtgtcacttgtaggtttctctgcctccaggttgcctcaacagcaggaggcacagcagtttcaccatctttgaggtgagggtggggtgccccagctaggaagcaagatcgctgtgctaggtctgaccaaaaccagagggcagtctagtcctgggggtaaagccctcagatcccagggtacactcttctccattccctccacccacttgcctgtcaccccagtcacctaagcaatcactgggcccagaggagaggagacagacacacactggctcctggacctaaagggtatgagctggagctaaggccagctagagcttccactgtcagccctcactgtcagccccactgcacccccctgtgcctgctgggcactgggcactagctagatgctttaggttgcttcagctgatccttcaactctgtgaggtggataccaatattctattttgcagatagaatttggcccagagaggttaactaatatatccatgatcacacagctaataaaagtcagagctcaggaaaaaaaaaaaaaaaaaaaaaaaaaaaaaaaa

SEQ ID NO: 299 - DNA, 3547 bp, Homo sapiens
gcactcgcccggctcgcccgctttcgcacccagttcacgcgccacagctatgtgtccccgagccgcgcgggcgcccgcgacgctactcctcgccctgggcgcggtgctgtggcctgcggctggcgcctgggagcttacgattttgcacaccaacgacgtgcacagccggctggagcagaccagcgaggactccagcaagtgcgtcaacgccagccgctgcatgggtggcgtggctcggctcttcaccaaggttcagcagatccgccgcgccgaacccaacgtgctgctgctggacgccggcgaccagtaccagggcactatctggttcaccgtgtacaagggcgccgaggtggcgcacttcatgaacgccctgcgctacgatgccatggcactgggaaatcatgaatttgataatggtgtggaaggactgatcgagccactcctcaaagaggccaaatttccaattctgagtgcaaacattaaagcaaaggggccactagcatctcaaatatcaggactttatttgccatataaagttcttcctgttggtgatgaagttgtgggaatcgttggatacacttccaaagaaaccccttttctctcaaatccagggacaaatttagtgtttgaagatgaaatcactgcattacaacctgaagtagataagttaaaaactctaaatgtgaacaaaattattgcactgggacattcgggttttgaaatggataaactcatcgctcagaaagtgaggggtgtggacgtcgtggtgggaggacactccaacacatttctttacacaggcaatccaccttccaaagaggtgcctgctgggaagtacccattcatagtcacttctgatgatgggcggaaggttcctgtagtccaggcctatgcttttggcaaatacctaggctatctgaagatcgagtttgatgaaagaggaaacgtcatctcttcccatggaaatcccattcttctaaacagcagcattcctgaagatccaagcataaaagcagacattaacaaatggaggataaaattggataattattctacccaggaattagggaaaacaattgtctatctggatggctcctctcaatcatgccgctttagagaatgcaacatgggcaacctgatttgtgatgcaatgattaacaacaacctgagacacacggatgaaatgttctggaaccacgtatccatgtgcattttaaatggaggtggtatccggtcgcccattgatgaacgcaacaatggcacaattacctgggagaacctggctgctgtattgccctttggaggcacatttgacctagtccagttaaaaggttccaccctgaagaaggcctttgagcatagcgtgcaccgctacggccagtccactggagagttcctgcaggtgggcggaatccatgtggtgtatgatctttcccgaaaacctggagacagagtagtcaaattagatgttctttgcaccaagtgtcgagtgcccagttatgaccctctcaaaatggacgaggtatataaggtgatcctcccaaacttcctggccaatggtggagatgggttccagatgataaaagatgaattattaagacatgactctggtgaccaagatatcaacgtggtttctacatatatctccaaaatgaaagtaatttatccagcagttgaaggtcggatcaagttttccacaggaagtcactgccatggaagcttttctttaatatttctttcactttgggcagtgatctttgttttataccaatagccaaaaattctccttgcctttaatgtgtgaaactgcattttttcaagtgagattcaaatctgccttttaggacctggctttgtgacagcaaaaaccatctttacaggctcctagaagctgaaggttagagcattataaaatgaagagacagacatgattactcagggtcagcaacctagtgagttagaaaaaaaattaacatagggccctataaggagaaagccaactatgttaagtttacgtgtccaaattttaatgaaattttactaacaattttaaaccatatttttcttcttcatatccatttctaatccatcaaacagcttatgtttacataaaattttatcattcacaaggaagttttaagcacactgtctcatttgatatccacaacttatttttggtaggaaagagagatgtttttcccacctgtcagatgaaaaaactgaagctcaaaaagggttgacttgaccatacagctaatgctgacagatccaagacctagacctaggtcttttgaactcaagtccagcattctcaactatatcaagttactgttcagaatacttaatatctcctctcttcataattatcaatagccccaagctcatggatgacaaatctctgctttatttcttgtctctattttttcactttatagctcctgttataatagcaagtttaatggtataaacacaggataccatcctctcttgcaacacccatgtgcctttgatgagtcaggtagcaagctgtagtagataatgagaaaggccagaggctgcaaagacagtcaaaggacacgagagaaaggaaggggaagaacaggactccaggactgttttatattatagaaaagcaagagctaaagagcatttacacatgttaaacagatacttgttaagcatagtgcctgacacacggcattagctgttattttatgagattccatcagctctgcctctgtcctctttcttctaacatgaaggtatcatgagaagagaaccttctaacataagctgtaattctaaacctgcacttgtccctctccagcaagaggctagcactgaattcattctactcatactacacacccagttatggaatgtccagagttctcgaagaaaataaatgactttaggaagaggtatacattttttaagtcgctctgcctccaaatctgaacagtcactgtaaatcattcttaagcccagatatgagaacttctgctggaaagtgggaccctctgagtgggtggtcagaaaatacccatgctgatgaaatgacctatgcccaaagaacaaatacttaacgtgggagtggaaccacatgagcctgctcagctctgcataagtaattcaagaaatgggaggcttcaccttaaaaacagtgtgcaaatggcagctagaggttttgataggaagtatgtttgtttcttagtgtttacaaatattaagtactcttgatacaaaatatacttttaaacttcataacctttttataaaagttgttgcagcaaaataatagcctcggttctatgcatatatggattgctataaaaaatgtcaataagattgtacaaggaaaattagagaaagtcacatttagggtttattttttacacttggccagtaaaatagggtaaatcctattagaaattttttaaagaactttttttaagtttcctaaatctgtgtgtgtattgtgaagtggtataagaaatgactttgaaccactttgcaattgtagattcccaacaataaaattgaagat

SEQ ID NO: 300 - DNA, 1426 bp, Homo sapiens
cggagcgggagcggtgcaggctgaggtctccgagcggctcgccatggctggcccgcagcagcagcccccttacctgcacctggccgagctgacggcgtcccagttcctggaaatatggaagcactttgacgcagacggaaatgggtatattgaaggtaaagagctagaaaactttttccaagagctggagaaggcaaggaaaggctctggcatgatgtcaaagagtgacaactttggagaaaagatgaaggagttcatgcagaagtatgataaaaactcagatgggaaaatcgagatggcagagctggcgcagatcctgccaaccgaagagaacttccttctgtgcttcaggcagcacgtgggctccagcgccgagtttatggaggcttggcggaagtacgacacagacaggagtggctacatcgaagccaatgagctcaagggattcctgtcagacctgctgaagaaggcgaaccggccgtacgatgagcccaagctccaggaatacacccaaaccatactacggatgtttgacttgaacggggatggcaaattgggcctctcagagatgtcccgactcctgcctgtccaggaaaacttcctgcttaaatttcagggcatgaagctgacctcagaggagtttaacgcgatcttcacattttacgacaaggatagaagcggctacattgacgagcatgagctggatgcccttttgaaggatctgtacgagaaaaacaaaaaggaaatcaatattcaacagctcaccaactacagaaagagcgtcatgtccttggcagaggcagggaagctctaccgcaaggacctggagattgtgctctgcagcgagccccccatgtaaagtggggacgggggctgcttctccacctcccccaaaccctgcttctgctgccctgatgcgtctacccagactcagagaccgtgagcgccccgcccccacccctacagcctgcacacacctgcctgcagagcaggaaacgagagatagaggatgggcagctggggggctgtcctgagccccctgcacccacccctgcccaggcagtctttgctcagtggatcacacacatggaaggtgatgggggcatgggtggagggtccctaattctcttcgctgtgatgcatgagctccctcgctgtatgatttaggcttctatgtccaacagagtggactcttccctctcgctcccctctgccggtcccccatgccaccacccaccccaaacttccaggttccatccaccaccttgccaatggtgtagctgtcctctcagaactcctgtgtgtggaaggcacccgccctttccttgccttctttactcggcgtgctccttttctctttgggtttcttgtttaccaaagaagagtttacagacaataaaatggaaaggtcctgctgtggaaactt

SEQ ID NO: 301 - DNA, 4505 bp, Homo sapiens
gaattccggagggagggtccccaacgctgggcttgcttgggggcagcccctcagcacagccggggaccgggaatgtggaggcgggaattccttctggcagaatgctggagcctttgccctgttgggacgctgcgaaagatctgaaagaacctcagtgccctcctggggacagggtgggtgtgcagcctgggaactccagggtttggcagggcaccatggagaaagccggtttggcttggacgcgtggcacaggggtgcaatcagaggggacttgggaaagccagcggcaggacagtgatgccctcccaagtccggagctgctaccccaagatcaggacaagcctttcctgaggaaggcctgcagccccagcaacatacctgctgtcatcattacagacatgggcacccaggaggatggggccttggaggagacgcagggaagccctcggggcaacctgcccctgaggaaactgtcctcttcctcggcctcctccacgggcttctcctcatcctacgaagactcagaggaggacatctccagtgaccctgagcgcaccctggaccccaactcagctttcctgcataccctggaccagcagaaacctagagtgagcaaatcatggaggaagataaaaaacatggtgcactggtctcccttcgtcatgtccttcaagaagaagtacccctggatccagctggcaggacacgcagggagtttcaaggcagctgccaatggcaggatcctgaagaagcactgtgagtcagagcagcgctgcctggaccggctgatggtggatgtgctgaggcccttcgtacctgcctaccatggggatgtggtgaaggacggggagcgctacaaccagatggacgacctgctggccgacttcgactcgccctgtgtgatggactgcaagatgggaatcaggacctacctggaggaggagctcacgaaggcccggaagaagcccagcctgcggaaggacatgtaccagaagatgatcgaggtggaccccgaggcccccaccgaggaggaaaaagcacagcgggctgtgaccaagccacggtacatgcagtggcgggagaccatcagctccacggccaccctggggttcaggatcgagggaatcaagaaagaagacggcaccgtgaaccgggacttcaagaagaccaaaacgagggagcaggtcaccgaggccttcagagagttcactaaaggaaaccataacatcctgatcgcctatcgggaccggctgaaggccattcgaaccactctagaagtttctcccttcttcaagtgccacgaggtcattggcagctccctcctcttcatccacgacaagaaggaacaggccaaagtgtggatgatcgactttgggaaaaccacgcccctgcctgagggccagaccctgcagcatgacgtcccctggcaggaggggaaccgggaggatggctacctctcggggctcaataacctcgtcgacatcctgaccgagatgtcccaggatgccccactcgcctgagctgcccacgccctccctggcccccgcctgggcctcctttcctcctcctgtgcttcctttctcgttcctaacttttccttcacttacacctgactgaccctcctgaactgcactacaagacactttgtagaagaggagatgagagtttctagtcattttcctaacttcagggcttggaggtggtgtttgcactgctttttgtagagagggtcacctactagaagagaaatgcccagtcttagaggtgggtcaggtgtagagctggagggggtccctggctgctgaggggaccctaccagatgagccctgcctctgggagccccctaggaagcaccagcctggacctaccacctgcggaggcctgctgccccctggcggccagtgctgttagagtgctgccaagcacagccttatttctgccggggcctccccaccggagagcccagggggccggccgggttcctggtccctggctgggagcagggctttctggtagttggggcacaaaaccatcggggaaccacatgttgactgtgagcaaagtgtcttccgattagcagcctcagggatgccctggtggcctctccagggctgctcaggcaaggccccccacccatctggtatggaaacctgccggctccaggccagacccaggagccaagagaaggctgaagccagcttggctgtgttctctgatctaggccttcccagaggaggcgagcagaagctgtgccacttggaattgcaacccatgagttcagaaggcacactctgccatgctgagctccaagggtgctaccaggggaagatgggatctatagagtctctgggccctggccccagggaggagcacatttttcttgaccctcacctacctggtgctagttggtcaaccctgcctgcatacatgggctcctgtcatggggcccagagtcccttgcagatatagaaataggggaggagctcaggtctgcgccaggcaggaagaaggcaggcttctggcttccagaggtgccgcggtggcctcctggcatcatttgttattgcctctgaaacaagccttactgcctggagggcttagattcctgcttccccaatgtagtgtgggtatcttgtagggtatgtggtggatgccagggcgtgctccaggcacctcttcctgaagtctctgcatttggagattcgtggagaacctatttaagcccaattttaactgaaagccagtgagtctgatatggaagggaatgtaaaatttgcctgacttcttaagaacaaaacccccagctctgtgccccatgctccttggggcttgccacccactcctttgctgtcagaggtacaggagctgggagagtccaggagctagggacacagagggagactatggaccaaggtgtgtgtgtctggaggaaccactgcccaccccaccaccccggggtctctggggaactgtcaacctgcccacgggacatgtacatttccccttttgtgctggaagtgtgagtgacacttgctgggggtggagggtgggacacatgaggatgtataagtacagattttaaaaaaggaaatcaacttacacttcctggctcttgtttaaaacagtggtgagctcctgtgtgggccgacttgctaaaggtcacacacgcgcccggtggagcacgagagacctcgtggcagcatgtgatctggaaggcaggcaggacgggggcgttggggagccaaagtcaactctgggcctctggagctatagtgacttttgggctagaagggaccctggtggtctgtgcttcagccatttgcagggcaggggcatcattaattcagacgtaaagattctatgaatatggactggccaaaagttatccttactccatctgtgaaagaagtttgctaaagcaaatcatgatatgaacaaaaattacaggggacctgtttaagagaacaaaatgttccaagcactttaggcagacaccagctgtttgcaaacaatgtgctaatatgcaaatgatgtgcttattaaaggaggcccatggggcctcttattggcaatacttggctgtgggttacattaaatatgtgaacatagtatgaagtagcatcattttagggttattctgttacttagggtttttgttttctgttttttttttctctttttttgtatttaccgtgctagttctcttctacacctactctgtctctcaagccattttgccactcgcttccctgccatctggcccttccctttgtctcagtgggatagatggattgtgaaatggaatctcccagaacccctgccctggcagcctggaagaccgtgcctgcccagccctcgtcaccacagggactccttgggtcctggcagtgcatgtgccagcaggcaggacaaactctgtgtacctgtgcccaggtgaatgggcgcagggtcctcttgccctgtcctgcggggggccccacgagttcctggcattcagcactgcttagcattctcggaaggtttcttcaactgcttgcttttcccaggcttgcctttagtgtcatgtaagacatttttaagttatatttattttgttgggttttaaaattgcacagaacactaagaccgaaaggctggactcttgtttctccttgaaagctttgcctttgttttgaacttcctttcccacttggtagaaagagcccagaagcagccctggccctgtaagatggactctttcatccttcagttgtatttagctttgagtttctctgcatctgtccaccccatgtgtatataacccagcccctggctctggggtggtcacctcgtcagtgccttttgttctggaggagaggacccccccgcctgccgagaggctctcttcctgttctgcacccctctccccatgggaccttggagaaaactgaactgttacaaacccctgcacagtgcctgtcaaacagatgcaaaccttcctgaataaagccttggagacggaattc

SEQ ID NO: 302 - DNA, 2304 bp, Homo sapiens
gaattcgtccaaactgaggatcacaagtctccacattctgagtaggaggatgagggtctgagttaggatttgggtcctgcagggcttgctaaggaatcccctgatggcctaggattccacgcagagcacatctggtgtgagagagctcgctgcaagggtgaaggctccgccctatcagatagacaaccaggccaccaagaggcccagccctccaaaccctggatttgcaacatcctcaaagaacagcaacgggccttgagcagaattgagaaggaaatacccccacctgccctcagccgttaagtgggctttgctattcacaagggcctctgggtgtcctggcagagaggggagatggcacaggcaccaggtgctagggtgccagggcctcccgagaaggaacaggtgcaaagcaggcaattagcccagaaggtatccgtggggcaggcagcctagatctgatgggggaagccaccaggattacatcatctgctgtaacaactgctctgaaaagaagatatttttcaacctgaacttgcagtagctagtggagaggcaggaaaaaggaaatgaaacagagacagagggaagcctgagccaaaatagaccttcccgagagaggaggaagcccggagagagacgcacggtcccctccccgcccctaggccgccgccccctctctgccctcggcggcgagcagggcgccgcgacccggggccggaaaggtgccaggggctccgggcggccgggcgggcgcacaccatccccgcgggcggcgcggagccggcgacagcgcgcgagagggaccgggcggtggcggcggcgggaccgggatggaagggagcgcggtgactgtccttgagcgcggaggggcgagctcgccggcggaggccgagcaagcggaggcaggagcggcggcgacggcggcggcggcggcggcgcccgagcacccgagggggtccgagccccggcagccggccagccccgcgccacaaagggagcgcccccgccgcccggcaccccgcctccctccccaatgtcctcggccatcgaaaggaagagcctggacccttcagaggaaccagtggatgaggtgctgcagatccccccatccctgctgacatgcggcggctgccagcagaacatcggggaccgctacttcctgaaggccatcgaccagtactggcacgaggactgcctgagctgcgacctctgtggctgccggctgggtgaggtggggcggcgcctctactacaaactgggccggaagctctgccggagagactatctcaggctttttgggcaagacggtctctgcgcatcctgtgacaagcggattcgtgcctatgagatgacaatgcgggtgaaagacaaagtgtatcacctggaatgtttcaagtgcgccgcctgtcagaagcatttctgtgtaggtgacagatacctcctcatcaactctgacatagtgtgcgaacaggacatctacgagtggactaagatcaatgggatgatataggcccgagtccccgggcatctttggggaggtgttcactgaagacgccgtctccatggcatcttcgtcttcactcttaggcactttgggggtttgagggtggggtaagggatttcttaggggatggtagacctttattgggtatcaagacatagcatccaagtggcataattcaggggctgacacttcaaggtgacagaaggaccagcccttgagggagaacttatggccacagcccatccatagtaactgacatgattagcagaagaaaggaacatttaggggcaagcaggcgctgtgctatcatgatggaatttcatatctacagatagagagttgttgtgtacagacttgttgtgactttgacgcttgcgaactagagatgtgcaattgatttcttttcttcctggctttttaactcccctgtttcaatcactgtcctccacacaagggaaggacagaaaggagagtggccattctttttttcttggcccccttcccaaggccttaagctttggacccaagggaaaactgcatggagacgcatttcggttgagaatggaaaccacaacttttaaccaaacaattatttaaagcaatgctgatgaatcactgtttttagacaccttcattttgaggggaggagttccacagattgtttctatacaaatataaatcttaaaaagttgttcaactattttattatcctagattatatcaaagtatttgtcgtgtgtagaaaaaaaaaacagctctgcaggcttaataaaaatgacagactgaaaaaaaaaaaa

SEQ ID NO: 303 - DNA, 2895 bp, Homo sapiens
cccgcctgacgactgaccagttgccatggcatcctactacgagatcctagacgtgccgcgaagtgcgtccgctgatgacatcaagaaggcgtatcggcgcaaggctctccagtggcacccagacaaaaacccagataataaagagtttgctgagaagaaatttaaggaggtggccgaggcatatgaagtgctgtctgacaagcacaagcgggagatttacgaccgctatggccgggaagggctgacagggacaggaactggcccatctcgggcagaagctggcagtggtgggcctggcttcaccttcaccttccgcagccccgaggaggtcttccgggaattctttgggagtggagacccttttgcagagctctttgatgacctgggccccttctcagagcttcagaaccggggttcccgacactcaggccccttctttaccttctcttcctccttccctgggcactccgatttctcctcctcatctttctccttcagtcctggggctggtgcttttcgctctgtttctacatctaccacctttgtccaaggacgccgcatcaccacacgcagaatcatggagaacgggcaggagcgggtggaagtggaggaggatgggcagctgaagtcagtcacaatcaatggtgtcccagatgacctggcacgtggcttggagctgagccgtcgcgagcagcagccgtcagtcacttccaggtctgggggcactcaggtccagcagacccctgcctcatgccccttggacagcgacctctctgaggatgaggacctgcagctggccatggcctacagcctgtcagagatggaggcagctgggaagaaacccgcaggtgggcgggaggcacagcaccgacggcaggggcgcccaaggcccagcaccaagatccaggcttgggggggacccaggagggtgcgaggggtgaagcaaccaaacgcagtccatccccagaggagaaggcctctcgctgcctcatcctctgaacaccgggcccaacctgatctgatccagatcttgactggggggtctgactcactgtgggaagagaagaggggagtatcctgagttgtaggaactgctttccaactccaagctccctccacaagtttccctccccaggccccccacaccccagtgtggacttgggatttgctgtgctcagcccagggctgataggtccctggtgaagcccagggtggggggtgtcagggcagtggaggggcccgaggagccaggttgcatttattggatggggagctccaaggggcattagtggtttgggctgggcttttgtgccctggtactctgccacctgtgttgctgatggtgtcaaggaaggaggacttggcctagggttgtctgagccggagccggcagctccactggagagcagtgcaggcagagtggagcctcctgctctcctggaccagctgcagacccccaaccctggtttctgtgccatgttgcgctctgaccgtctctgttgcttctcttctggtgttgcttctcctccctcccattctctctgcaactcctgcgggcgcatcgcttgctttcactgccgtctggctaggactcccttcttccttccttccccgagaaggcctcaatgtggcgaggaagatgctggggccggtagggctgtgagatcttctggggaggctagccgggtggggcgggagcctctcagctgtccagattcagaactggagcccactcctcctccctctcgttgcctcagccctgccctcaccctcagactaggcagaggtgaggctggctcaccctgaagaggtgggataggaggggactgcacccatactgcttccctaccacaaatcagggctcagggagaggccatgcggcagcccaggtctgcatgctgagccccatcctccacagcttgccgctgacgctctctcctgtcaccccgcccctgctctctccccagatgtgttctgagctggatgccgggttccagaatcgctgcacagttccaacaggacagcgccttcccccatgcgctgggaggggaccctccatttctccccctcacccatgctgagtgtagagccggggcctgggtggcgggtgggggccgggtgggaggtggcagtagtcttagcctgtgcactctcttccttgggtgtttggtgctggctcctggggactacaaatcccagagtgcggtgtgcccggcctcatttctgatagatcccgcttgggggaggtggtgtatggttacggagctgtgcatcttgggacatgtagtagcccaggtcttgtcactcgctgtgagatggggagattttgtcttttgatttatccctgtagggctggcagggttgtagatgaagggggaatgatctgagccttggttcccctgacacgtcttgctagccccagggttagagtgggcagggcagagccgcgcagcacctgggagcggtacctttcccttgggcagcctggggtcccaggaacaagccagggcgagtggcatgtctgcctgagcagggtgtggccccagaaagctgaggagtgtgggctggcagagagcttcgagggcaaggccacccgcgggggcgtgtgtgtggtggggcttggcatgtgatggcagctccagctccaggcatgccgctgcttgtatggctttctttggcctctgaccctgctgcccattctttccaacatcacagatgaactgcctctcctcctccctgcctggggagcccagtggccagggagggagtggtggagccagtcgctgtaacactgagcctcagagacgaaccaaaaccagctgggctgagctcagatccagggggaagaaatgctggaagtcaataaaactgagtttgagaaaaaaaaaaaaaaaa

SEQ ID NO: 304 - DNA, 1267 bp, Homo sapiens
cagcgagcggctgcagcggggccgtgaccagcagccagcgggaggcggcggcgagtcggtgagcagctgggaagagcagaaccggggcggagcacctgcaggcgcgggcggcggccccaccatggcgattcgcaagaaaagcaccaagagccccccagtgctgagccacgaattcgtcctgcagaatcacgcggacatcgtctcctgtgtggcgatggtcttcctgctggggctcatgtttgagataacggcaaaagcttctatcatttttgttactcttcagtacaatgtcaccctcccagcaacagaagaacaagctactgaatcagtgtccctttattactatggcatcaaagatttggctactgttttcttctacatgctagtggcgataattattcatgccgtaattcaagagtatatgttggataaaattaacaggcgaatgcacttctccaaaacaaaacacagcaagtttaatgaatctggtcagcttagtgcgttctacctttttgcctgtgtttggggcacattcattctcatctctgaaaactacatctcagacccaactatcttatggagggcttatccccataacctgatgacatttcaaatgaagtttttctacatatcacagctggcttactggcttcatgcttttcctgaactctacttccagaaaaccaaaaaagaagatattcctcgtcagcttgtctacattggtctttacctcttccacattgctggagcttaccttttgaacttgaatcatctaggacttgttcttctggtgctacattattttgttgaatttcttttccacatttcccgcctgttttattttagcaatgaaaagtatcagaaaggattttctctgtgggcagttctttttgttttgggaagacttctgactttaattctttcagtactgactgttggttttggccttgcaagagcagaaaatcagaaactggatttcagtactggaaacttcaatgtgttagctgttagaatcgctgttctggcatccatttgcgttactcaggcatttatgatgtggaagttcattaattttcagcttcgaaggtggagggaacattctgcttttcaggcaccagctgtgaagaagaaaccaacagtaactaaaggcagatcttctaaaaaaggaacagaaaatggtgtgaatggaacattaacttcaaatgtagcagactctccccggaataaaaaagagaaatcttcataatgaattataaactaattgatt

SEQ ID NO: 305 - DNA, 5857 bp, Homo sapiens
cggcgcaggcggcggcgtccgaggagatttaatccagagactgacttcactatagaacccacagttgtatcaatggttggggaaagatagtggcaacaggcaaaggagaaacagctctgacatacaaagaaaatgagtatgctaaagccaagtgggcttaaggcccccaccaagatcctgaagcctggaagcacagctctgaagacacctacggctgttgtagctccagtagaaaaaaccatatccagtgaaaaagcatcaagcactccatcatctgagactcaggaggaatttgtggatgactttcgagttggggagcgagtttgggtgaatggaaataagcctggatttatccagtttcttggagaaacccagtttgcaccaggccagtgggctggaattgttttagatgaacccataggcaagaacgatggttcggtggcaggagttcggtatttccagtgtgaacctttaaagggcatatttacccgaccttcaaagttaacaaggaaggtgcaagcagaagatgaagctaatggcctgcagacaacgcccgcctcccgagctacttcaccgctgtgcacttctacggccagcatggtgtcttcctccccctccaccccttcaaacatccctcagaaaccatcacagccagcagcaaaggaaccttcagctacgcctccgatcagcaaccttacaaaaactgccagtgaatctatctccaacctttcagaggctggctcaatcaagaaaggagaaagagagctcaaaatcggagacagagtattggttggtggcactaaggctggtgtagtccggtttcttggggagaccgactttgccaagggggagtggtgtggcgtggagttagatgagccacttgggaagaatgatggcgctgttgctggaacaaggtattttcagtgtcaacccaaatatggcttgttcgctcctgtccacaaagttaccaagattggcttcccttccactacaccagccaaagccaaggccaacgcagtgaggcgagtgatggcgaccacgtccgccagcctgaagcgcagcccttctgcctcttccctcagctccatgagctcagtggcctcctctgtgagcagcaggcccagtcggacaggactattgactgaaacctcctcccgttacgccaggaagatctccggtaccactgccctccaggaggccctgaaggagaagcagcagcacattgagcagctgctggcggaacgggatctggagagggcggaggtggccaaggccacgagccacgtgggggagatagagcaggagctagctctggcccgggacggacatgaccagcatgtcctggaattggaagccaaaatggaccagctgcgaacaatggtggaagctgctgacagggagaaggtggagcttctcaaccagcttgaagaggagaaaaggaaggttgaggaccttcagttccgggttgaagaagaatcaattaccaaaggtgatcttgagacgcagaccaaactggagcatgcccgcattaaggagcttgaacagagcctgctctttgaaaagaccaaagctgacaaactccagagggagttagaagacactagggtggctacagtttcagaaaagtcacgtataatggaactggagaaagacctagcattgagagtacaggaagtagctgagctccgaagaaggctagagtccaataagcctgctggggatgtggacatgtcactttcccttttgcaagagataagctctttgcaagaaaagttagaagtcacccgtactgaccaccagagagaaataacttctctgaaggagcattttggagcccgggaagaaactcatcagaaggagataaaggctctgtataccgccacggaaaagctttccaaagagaacgagtcattgaaaagcaagctggagcatgccaacaaagagaactcagatgtgatagctctatggaagtccaaactggagactgccatcgcatcccaccagcaggcgatggaagaactgaaggtatctttcagcaaagggcttggaacagagacggcagaatttgctgaactaaaaacacaaatagagaaaatgagactagattaccaacacgaaatagaaaatttgcagaatcaacaagactctgaacgggctgcccatgctaaagagatggaagccttgagggctaaactgatgaaagttattaaagaaaaggaaaacagtctggaagccatcaggtcgaaactggacaaagcagaagaccagcatctcgtagaaatggaagacacgttaaacaaattacaggaagctgaaataaaggtaaaggagctagaggtactgcaagccaaatgcaatgaacaaaccaaggttattgataattttacatcacagctcaaggctactgaagaaaagctcttggatcttgatgcacttcggaaagccagttccgaaggtaaatcggaaatgaagaaacttagacagcagcttgaggcagctgagaaacagattaaacatttagagattgaaaagaatgctgaaagtagcaaggctagtagcattaccagagagctccaggggagagagctaaagcttactaaccttcaggaaaatttgagtgaagtcagtcaagtgaaagagactttggaaaaagaacttcagattttgaaagaaaagtttgctgaagcttcagaggaggcagtctctgttcagagaagtatgcaagaaactgtaaataagttacaccaaaaggaggaacagtttaacatgctgtcttctgacttggagaagctgagagaaaacttagcagatatggaggcaaaatttagagagaaagatgagagagaagagcagctgataaaggcaaaggaaaaactggaaaatgacattgcagaaataatgaagatgtcaggagataactcttctcagctgacaaaaatgaacgatgaattacgtctgaaagaaagagatgtagaagaattacagctaaaacttacaaaggctaatgaaaatgcaagttttctgcaaaaaagtattgaggacatgactgtcaaagctgaacagagccagcaagaagcagctaaaaagcatgaggaagaaaagaaagaattggagaggaaattgtcggacctggaaaagaaaatggaaacaagccacaaccagtgtcaggagctgaaagccaggtatgagagagccacttctgagacaaaaaccaagcatgaagaaatcctacagaacctccagaagacgctgctggacacagaggacaagctgaagggcgcacgggaggagaacagtggcttgctgcaggagctggaggagctgagaaagcaagccgacaaagccaaagctgctcaaacagcggaagatgccatgcagataatggaacagatgaccaaagagaagactgagactctggcctccttggaggacaccaagcaaacaaatgcaaaactacagaatgaattggacacacttaaagaaaacaacttgaaaaatgtggaagagctgaacaaatcaaaagaactcctgactgtagagaatcaaaaaatggaagaatttaggaaagaaatagaaaccctaaagcaggcagcagctcagaagtcccagcagctttcagcgttgcaagaagagaacgttaaacttgctgaggagctggggagaagcagggacgaagtcacaagtcatcaaaagctggaagaagaaagatctgtgctcaataatcagttgttagaaatgaaaaaaagagaatccaagttcataaaagacgcagatgaagagaaagcttccttgcagaaatccatcagtataactagtgccttactcacagaaaaggatgccgagctggagaaactgagaaatgaggtcacagtgctcaggggagaaaacgcctctgccaagtccttgcattcagttgttcagactctagagtctgataaggtgaagctcgagctcaaggtaaagaacttggagcttcaactcaaagaaaacaagaggcagctcagcagctcctcaggtaatacagacactcaggcagacgaggatgaaagagcccaggagagtcagattgatttcctaaattcagtaatagtggaccttcaaaggaagaatcaagacctcaagatgaaggtggagatgatgtcagaagcagccctgaatgggaacggggatgacctaaacaattatgacagtgatgatcaggagaaacagtccaagaagaaacctcgcctcttctgtgacatttgtgactgctttgatctccacgacacagaggattgtcctacccaggcacagatgtcagaggaccctccccattccacacaccatggcagtcggggtgaggaacgcccatactgtgaaatctgtgagatgtttggacactgggccaccaactgcaatgacgacgaaaccttctgatgaagcctccagtggagaactgggcttgctcagacgcactcgcattgacacaacgtaacaccagcattgtgtgtgcagacttcaggagaactcatgttattttttaaccccgtcaacaaatctaggaaaatattttgatcttcaacaaattgccctttagtctccccgtatgagttagaataataaatatttagtaggtgagttttcacctcgaattttgttttcttgatttttacgtttgaagacattgcaccagatgccattacatttattggccccccgaccttgtagaaaaacccctaccctcacaataccttatttaagtaactttaaattatgccgttacttttcatatttgcacctaagatatttccaggctgcatttgtatatttagattttttggttaagctttgacactggaatgagttgaaaaaatgtgccattttgcattttcatctactcatttaaagtattttattcttattcaaagaaatatctgagctctttgcactacctgttatcagtagtgcctttacttcaggcttgataatacttaggtgtgattataaaatcatgaagcaggtaaagggaggggcaagccccaaactgctgtggggacattttataatctatatgctgcacccacttaatctactgtggtgttttgtttattagttttgcataatttcagcttctatatattgtatgtatatattttttaaaaatctatattttgggaaaaaaacatacacaatgtgtctttctttttggacatttacctttttgaaaaagaaaacacttaaaatgatcattaggacataacagactaggccagacatagcatcttgtggctttgcaaccattttcatttgtttgttttccttttatttcttcaccagatttaaataaaaggaggaattttctccaatttttttttccttctctggcaggtatccccagcagtcaattaacaataagccagtataaaacacctaaataaccaatctacaatctcccttcacaagtttttttactgtttttagatgaatgtacgatgagaaattcaacgttaataattctggattttcttatcacaaaaaagaaaatgaaggacctcaaagcacctgaacagtttatcgaccagtttgaatctatttatcttcatttgaatgtcttctagatatgtaaaaagtcataaaatgtatcttccatgctacatgtacaataagaacttctataattgtatatatgcctttgatgtattttcccctcaagattatcaactgtgtgttcgacagtgaatattcaatctggtaccagttgaaatttttggttataaatgtaatacgaattgtttcacaaacagaaaacatgtaaagcagtattaaaatttggccaaacaagtgttctgtatctacttttaataaatggttattcttt

SEQ ID NO: 306 - DNA, 1448 bp, Homo sapiens
ccaccatgctcgccctggaggctgcacagctcgacgggccacacttcagctgtctgtacccagatggcgtcttctatgacctggacagctgcaagcattccagctaccctgattcagagggggctcctgactccctgtgggactggactgtggccccacctgtcccagccaccccctatgaagccttcgacccggcagcagccgcttttagccacccccaggctgcccagctctgctacgaaccccccacctacagccctgcagggaacctcgaactggcccccagcctggaggccccggggcctggcctccccgcataccccacggagaacttcgctagccagaccctggttcccccggcatatgccccgtaccccagccctgtgctatcagaggaggaagacttaccgttggacagccctgccctggaggtctcggacagcgagtcggatgaggccctcgtggctggccccgaggggaagggatccgaggcagggactcgcaagaagctgcgcctgtaccagttcctgctggggctactgacgcgcggggacatgcgtgagtgcgtgtggtgggtggagccaggcgccggcgtcttccagttctcctccaagcacaaggaactcctggcgcgccgctggggccagcagaaggggaaccgcaagcgcatgacctaccagaagctggcgcgcgccctccgaaactacgccaagaccggcgagatccgcaaggtcaagcgcaagctcacctaccagttcgacagcgcgctgctgcctgcagtccgccgggcctgagcacacccgaggctcccacctgcggagccgctgggggacctcacgtcccagccaggatccccctggaagaaaaagggcgtccccacactctaggtgataggacttacgcatccccaccttttggggtaaggggagtgctgccctgccataatccccaagcccagcccgggcctgtctgggattccccacttgtgcctggggtccctctgggatttctttgtcatgtacagactccctgggatcctcatgttttgggtgacaggacctatggaccactatactcggggaggcagggtagcagtgcttccagagtcccaagagcttctctgggattttcttgtgatatctgattccccagtgaggcctgggacctttttaagatcgctgtgtgtctgtaaaccctgaatctcatctggggtgggggccctgctggcaaccctgagccctgtccaaggttccctcttgtcagatctgagatttcctagttatgtctggggccctctgggagctgttatcatctcagatctcttcgcccatctatggctgtgttgtcacatctgtcccctcatttttgagatcccccaattctctggaactattctgctgcccctttttatgtgtctggagttccccaatcacatctagggctcctcc

SEQ ID NO: 307 - DNA, 2679 bp, Homo sapiens
aatattgtatgatttcacttatacgaggcactagaataggcaaattcataaagacagcaagaatagtggttaccaggggctgaggaaagggagaaattgagttattttgtttaatgagtttccatttgggatgatgaaaaaagttgtggaaatggatattggagatggttgcacaacgctgtgaatgtacttaatgccactgaatcatacacctaaaaatgattaaaattgtaaattttatgttacatgtattttaccactataaaaaagcaataggtgcataagtaaaagcatcacacaccagaaaattatagaaaatgagaagggaaacctcctttttcctgtcctcctccccttaacaaataccaagtgttcgtagtggttgtctctgtaattctaaatcattgaggtaactctctataccttgattgttcctctgtagtgtctgcaacctcctctccaaggatgaggaattgactgcacttccactaagtcctaccaaccctctgcttctgtctcttgatatttgatagttacatcatactttggattttccagtggttaacttttagctttaaataacatacttaggctttttctccttaaattttttaaatatggaaattttcaagcatatacaaaagcagagaaaagactacagtaagcctctatatacccagccttctgcttctattacaaactcatagtcaacttgcttcatctgtatctccacgcactcccctccaccaattattttgaaacaaatcttagacattgtatcattttatctacatatttcagtatgtatgtcttaaaaaaataagcattctcatctaggtcaatgccattgagaaagtcttcaaagtgtacaatgaagctggtgtgacctttacatagatggatcgtggctgacttcctcactaccctcttcacctgtaacttctgcagacctatcacaagtttacatgtaaccacagaaatccctttccctcctgactcattagataatggataccattcgcaacaagtcaatccaaatcagccccttaaggagaaacaaattaaggttaggggatcatgtaaaagctgagtgtgaaagtagaaatcacctacaccagagagccattttggtattttgcctttaaactctcctccatctggctgtgcagtcttgctctgtggcttttcccaacacaatcagtgctattgctggggagggacagtcaagagcagtcagttgctctggacaagtctgggacatgctataactttagcatatttaagaagtaggggtgtggcattttcggaaggtggcatagtcctcaagtgagttcttagtattttatatcagcaaaataactcaattttacaggttgcaaacaaatataaaagctgtttctatttatgaattttattctttcagaataaaataagtacatgctgctgtaataaaattgcctttaatcacttaacaaccctaaccttgactcaaacagtgaatgcctataaaaataagaaattttaaaaactagtatttttatatcataaaacaatgtcatttataacttatcagtcatgcattgttgtccagcaaacattaaaagccctgtggataattatcttcatacttgcaaaaatgatagaggctatttttgttaaaactgtcagaatttgctaactatgacacatgggccaaagaaagcagtaacctccttatcatgttaaccaattgttctcttttgaagatctattgttgactaattgaacaataatcaagtggagtgtcccagaaagaaaccacttgggctccctgtttggagtctggctggctctgagcattgccaatggcccctactcgcctgactttgtgtcctctccttttagaggccttgcgttctgcagctagcttcattaacagtgggctgaaaacaactttgggttgagtgtttcgtttgggagttatttggccagggctttagagcagtagtgtcccaatgaagtgctagataataaatgtgtacaaatcagttcttttttttttaactataactccctttcagaaatttctaactactttgtaactgcattacttaacctggtgataaaagcagttattaaaagtctacattttccaggccaggcacggtagctcatgcctacaatcctagtgctttgggaggccaaggcgggtggatcacctcaggtagggagtttgagaccagcctgaccaacatggtgaaaccccgtctctagtaaaaatacaaaaaattagccgggcgtggtggtgcatgcctgtaatcccagcaacttgggaggctgaggcaggagaatcacttgaacccaggagcggaggttgcagtgagccgagatcgctccattgcactccagcctgggcaaacaagagcgaaactccatctcaaaagaaaaaaaaaagtctacattttccaaaaataaaaaaaacaaaaaaaaggatgctcaagaaagcataacctcaatgccattaccacacctaaaaaaaataattccttaatagccagtgactattgaaattttactctctttttctctgtgttcaaagatgtatctaaatacagtccttatactacaatcaatttacacgtctctttagactcttaatctataggtcctcactcttctttttcttcctatggcaatatt

SEQ ID NO: 308 - DNA, 1630 bp, Homo sapiens
gggaccggccgctcccgcagcagccatgtcgttcttcccggagctttactttaacgtggacaatggctacttggagggactggtgcgcgcctgaagggctgggcgagctcagccaggccgactacctcaacctggtgcagtgcgagacgctagaagacttgaaactgcatctgcagagcactgattatggtaacttcctggccaacgaggcatcgctctggcggtgtcagtcatcgatgaccggctcaaggagaagatggtggtggagttccgccacatgaggaaccatgcctatgagccactcgccagcttcctagacttcattacttacagttacatgatcgacaacgtgatcctgctcatcacaggcacgctgcaccagcgctccatcgctgagctcgtgcccaagtgccacccactaggcagcttcgagcagatggaggccgtgaacattgctcagacacctgctgagctctacaatgccattctggtggacacgcctcttgcggcttttttccaggactgcatttcagagcaggaccttgacgagatgaacatcgagatcatccgcaacaccctctacaaggcctacctggagtccttctacaagttctgcaccctactgggcgggactacggctgatgccatgtgccccatcctggagtttgaagcagaccgccgcgccttcatcatcaccatcaattctttcggcacagagctgtccaaagaggaccgtgccaagctctttccacactgtgggcggctctaccctgagggcctggcgcagctggctcgggctgacgactatgaacaggtcaagaagctggccgattactacccggagtacaagctgctcttcgagggtgcaggtagcaaccctggagacaagacgctggaggaccgattctttgagcacgaggtaaagctgaacaagttggccttcctgaaccagttccactttggtgttttctatgccttcgtgaagctcaaggagcaggagtgtcgcaacatcgtgtggatcgctgaatgtatcgcccagcgccaccgcgccaaaatcgacaactacatccctatcttctagcgtctggcccaaggctctcaagtgtgtgtgcgtgtgtgtgtatgtggtctgttacaagcctgtggctcacctgcctgtccggggtgtagtacgctgtcctagcggctgcccagttctcctgaccctcttagagactgttcttaggcctgaaaaggggctgggcccccccccccccaccaaggatggatggatgaagaccccctccagagcaaggaggccccctcagccctgtggttacagccgctgatgtatctaagaagcatgtcactttcatgttcctccctaactccctgacctgagaaccctggggcctgggggcagtttgagcctcctctcccttctgtgggtcgctcccagagccatggcccatgggaaggacagagtgtgtgtgtccttggcctggggggtgttgctcctcacgtccctccctcagccctgcccctctgagacaataaaactgccctctctaagcccaaaaaaaaaaaaaaaaaaaaaaaaaaaccggaattcgagctcgcccggggactcctctagagtcgacctgcagcc

SEQ ID NO: 309 - DNA, 2919 bp, Homo sapiens
agagtttcagttttggcagcagcgtccagtgccctgccagtagctcctagagaggcaggggttaccaactggccagcaggctgtgtccctgaagtcagatcaacgggagagaaggaagtggctaaaacattgcacaggagaagtcggcctgagtggtgcggcgctcgggacccaccagcaatgctgctcttcgtgctcacctgcctgctggcggtcttcccagccatctccacgaagagtcccatatttggtcccgaggaggtgaatagtgtggaaggtaactcagtgtccatcacgtgctactacccacccacctctgtcaaccggcacacccggaagtactggtgccggcagggagctagaggtggctgcataaccctcatctcctcggagggctacgtctccagcaaatatgcaggcagggctaacctcaccaacttcccggagaacggcacatttgtggtgaacattgcccagctgagccaggatgactccgggcgctacaagtgtggcctgggcatcaatagccgaggcctgtcctttgatgtcagcctggaggtcagccagggtcctgggctcctaaatgacactaaagtctacacagtggacctgggcagaacggtgaccatcaactgccctttcaagactgagaatgctcaaaagaggaagtccttgtacaagcagataggcctgtaccctgtgctggtcatcgactccagtggttatgtgaatcccaactatacaggaagaatacgccttgatattcagggtactggccagttactgttcagcgttgtcatcaaccaactcaggctcagcgatgctgggcagtatctctgccaggctggggatgattccaatagtaataagaagaatgctgacctccaagtgctaaagcccgagcccgagctggtttatgaagacctgaggggctcagtgaccttccactgtgccctgggccctgaggtggcaaacgtggccaaatttctgtgccgacagagcagtggggaaaactgtgacgtggtcgtcaacaccctggggaagagggccccagcctttgagggcaggatcctgctcaacccccaggacaaggatggctcattcagtgtggtgatcacaggcctgaggaaggaggatgcagggcgctacctgtgtggagcccattcggatggtcagctgcaggaaggctcgcctatccaggcctggcaactcttcgtcaatgaggagtccacgattccccgcagccccactgtggtgaagggggtggcaggaagctctgtggccgtgctctgcccctacaaccgtaaggaaagcaaaagcatcaagtactggtgtctctgggaaggggcccagaatggccgctgccccctgctggtggacagcgaggggtgggttaaggcccagtacgagggccgcctctccctgctggaggagccaggcaacggcaccttcactgtcatcctcaaccagctcaccagccgggacgccggcttctactggtgtctgaccaacggcgatactctctggaggaccaccgtggagatcaagattatcgaaggagaaccaaacctcaaggtaccagggaatgtcacggctgtgctgggagagactctcaaggtcccctgtcactttccatgcaaattctcctcgtacgagaaatactggtgcaagtggaataacacgggctgccaggccctgcccagccaagacgaaggccccagcaaggccttcgtgaactgtgacgagaacagccggcttgtctccctgaccctgaacctggtgaccagggctgatgagggctggtactggtgtggagtgaagcagggccacttctatggagagactgcagccgtctatgtggcagttgaagagaggaaggcagcggggtcccgcgatgtcagcctagcgaaggcagacgctgctcctgatgagaaggtgctagactctggttttcgggagattgagaacaaagccattcaggatcccaggctttttgcagaggaaaaggcggtggcagatacaagagatcaagccgatgggagcagagcatctgtggattccggcagctctgaggaacaaggtggaagctccagagcgctggtctccaccctggtgcccctgggcctggtgctggcagtgggagccgtggctgtgggggtggccagagcccggcacaggaagaacgtcgaccgagtttcaatcagaagctacaggacagacattagcatgtcagacttcgagaactccagggaatttggagccaatgacaacatgggagcctcttcgatcactcaggagacatccctcggaggaaaagaagagtttgttgccaccactgagagcaccacagagaccaaagaacccaagaaggcaaaaaggtcatccaaggaggaagccgagatggcctacaaagacttcctgctccagtccagcaccgtggccgccgaggcccaggacggcccccaggaagcctagacggtgtcgccgcctgctccctgcacccatgacaatcaccttcagaatcatgtcgatcctgggggccctcagctcctggggaccccactccctgctctaacacctgcctaggtttttcctactgtcctcagaggcgtgctggtcccctcctcagtgacatcaaagcctggcctaattgttcctattggggatgagggtggcatgaggaggtcccacttgcaacttctttctgttgagagaacctcaggtacggagaagaatagaggtcctcatgggtcccttgaaggaagagggaccagggtgggagagctgattgcagaaaggagagacgtgcagcgcccctctgcacccttatcatgggatgtcaacagaattttttccctccactccatccctccctcccgtccttcccctcttcttctttccttaccatcaaaagatgta

SEQ ID NO: 310 - DNA, 18061 bp, Homo sapiens
tgtaccgagctctaatacgactcactatagggcgtcgactcgatcatcccaacacccaggtattaagcctagcgtccattagctattcttcctgatgctttccccccaaccacaggtgccagtgtgtgttgttctccgccatgtgtccctgtgtggaaaatataatatgcattcttaacctgtcaatatctaaagttaatctgtatgtttgctgttttcctaaacagtcccgcaatttagaacaatttaactccattcatccccttccagccctcatctactttaattccatattgttttttcttctcaatagatatattattttatagccaatacttgtctttacatttacatttggtcgcatgcttagcactctatttgttcattattttaattcttttatgcatctcagaactttcatctggaatcatcttccttctgcttaaaacacattctttcagattgctcttagtgaaaacttagaagttgatggcaaattcagttttttaaatgttgaaaatggctttattttacccttcttcaaatataatgttaccgagtcagaaaattccggaatggcagttatttcctcccagcacattgaagattctattccatttccagtgtccattgttgcttttgaggagtcagtcatcagtctaaccaccattcctttgttggtgatttattctctatctgcttgtaattatctggttttctgcctcaatgtgtgtagtgatttatttttattccttttgcctggaattcattaggtctccttaatctgagaacttgggttttttttaaagaattctataaaattctcacttttattttgttgaatgttttcttattctcttgtgtcttcttctggaactctgattagacatatttagaccttctaattatagccttcatgccttcttgacttcctccttcgtcacttagctgcattctggaaattttcctcagagctacattttgttcaataatcctggcttaatctgttcctggatccatccactgaacttgtaattttaacggcattatttatttcctctggtttgtatttcagatctgcttggtacttgctccaattttaagtttgttttattttctaaaacaatttatatttatattcttcatccaatcattctatagccactatgagacaataaataaatccatccaactcatcaaaacacagctgagaattaccaaataagtacaaacaaaaacctaaatatgactgattaactgtgcagaatacaatgatgtaagtttactatacatcaacctccttgtacccatctcctcgcttcaacaaataactcagggcaaaacttccttcatccatacttccaccctccttctccctgtctgaacaagatgccactccagagactgcaggttctatgtctatcatatgtgattgcaatagcttggtcatggtagaatacaaaaaaaaagaaaaaagttgaaagccctctgaaaactgtagtgcttataatagccttcccaactactggccatacttaatattaatcattaacactctcagtagagtgtctcagaagtcaaaatgtatctcctactagctacaaggaagttgggatctaataagtatttatttacagctgcagtcacccaacagcctgaaataccagggtctctaaattcatgactttgtgtatgaacaagggtcaataggatctttactcagtcctcgagatataactcagaaaaatgaattgctgtgaaaaactcacttgatttcctgtggtcacattataagatcgaataatctacaaaagtacaaaactcagtgatatagagaagccagcaaattctcctgcccttatataaacaggtgggaggctttccagtagaattttttctactccaacaaattggtagattgaatgactatacctcataatgatgacactattgtatcatattttagtttaaatttaaaacctcaaaaacttaccaaaactagccaaagatttctggaataagatatagacaaagttatttctcaaaaaaaagaaaaaaattggctgggccgggtgcagtggctcacgcctgtaatgccagcactttgggaggctgaggcaggcagatcacaaggtcaagggatcaagatcaggctggccaacgtggtgaaaccccatctctactaaaaatacaaaaatcagctcggcggtggtgcccacctgtaatcccagctactagggaggctgaggcaggagaattgtgtgaaccggggagggggaggttgcagtgagctgagatcatgccactgcactccagcctggtgacagagcaaagctccgtctcaaaaaaaaaaaaaaaaaaaaaaaaaaacggctggacacaggggctcacacctgtaatcccatcattttgggagggtggggtgggaggatcacttgagctcaggagtttgagtccagcctgggcaacatagtgggaccctgtttctaccaaaaataaataaataaaaattatgtaagcatggcgtgtgtgcctgtagtcccagctacttgagaggctgaagcaggaggatcacttgagcctgggaggtcaaggctgcagtgagctgtgattgtgtcactgcactccagcctgggtcacacagtgagaccctgtctcaaaataaaaataaaatggaaaataactaaaaatgggattttcaactctttgatataaataggtccagccataaggaagaattgtgctacaaaagagaacaaaaatcatcatgtttaacaactgcattcatgttcttttctaattataaagctaactattgattttataatgcttctacacaccttgatcatgtgttagcatatgaaactcttagctgagaccaacttactataaaacttgtgtaatttaaatagtataattttccaatgactttaatctaacaacctcctaccccattaatcaacaccaaaaacaattcatctttgaatacatgtataaagaacatagttcatgtgtttataaaaagttcttctctgctacagagtttagctgtgacatctattaacaaagtaatttataactctaataagttagcaaggtcttcttgctaccagtccagtcattggtggtgagtactcagtattggctgatgaatacatgaatggataaaaatataagagctgcccacacatataccataaaatgcataaaatagattccattttatctcaatttttatttctgtgatataactaagataaaatcaaacacaatgtattattttaaagtatactgtttataagagagaaataataagatctgaccttattttagaagaaagttgtgtgtaaaagaaatttaaactcaaaagtaaaaaagccactggtttctaaaaactcaaaaaaaattttttttaagtgactggctttcagaacaacagcaacaacaaataagccactaaaataagacaattaaattccaattttttttgcatttacttgcttgcttaattatatacaaatctcaattccattaaagtatcaggatgacaattaattagatgtttttagtgacttttccaatcccttctaattaacttggaagtgattaactgattatctaattatattaattagtgattatctaattaactaaggaagtgatttacatgcttcatgggaagtgtgaattctcagccagggggtttgaatgaagggaagcaagtgactcaggcatttattggttgcttacaatcagattcccaccgatgagatcatgcccatgtgtctagaggtccacacacaagcagctgcctccagcccaaccctggaagctgagtgtagtcccaagtccccgcctgcaccccttcctatataaacagccactctcgctgtgattatgggggcatacaaggaagatcaggcttccatggaagcttctgcaactgaaatccactggggactttagaaggagcacctgtaagtagcttcaggatggatggggcagagtctgtctcatggtgggtgttaagctggcctcatacaaaagaggagacccatcctgataccatgccaggtacaaagcactgtgtgatttattctaagtgtcttggtaacaggacttgaagccaggtggtgactggaaacctaaaatgcaatatttagtcatagaacattagaaatagaaagaaaataacctcccaaatcatctaatccatcactcagctaaattcatttaattcacatccccaaactacatctccaaatgtacaatggtttcattcctggtttagggattcgaggttttgtgtttgtacaaaatattttaatagtcttataaaataagatgtccaaaacacaataaacttaaaagccaaacacaagcaaagcatgaaacagaggttctgaagagcaactcctcaatacaaatcaaacattgtcctttatctccattgtgactttcagttatgtaggcacatctgcctttttagatacctaaattatacatgaggattgtaaatattctttgtgtgtatgttaggatgaaaaaaacctgccaaggcaggcgcatgggctaaaagaatacactttcctgtttccttttattacctgtttaattaaaaaaaaaaaaagttgcccctgataaaagcctccaagaaatgcctctagtggtattttctggaattgaattaagcatattaacatattgctatacaaagcggggggcgtggaagtaaggcaaggtggactgtggtgccaatcctagtgacatgtcagcagaggaggagtttcttgcctgtggacttcataaaaggctagctcaacaccctccatgagacacactctgccccaaccatcctgaagctacaggtgctccctcctggaatctccaatggatttcagtcgcagaagcttccacagaagcctgagctcctccttgcaggcccctgtagtcagtacagtgggcatgcagcgcctcgggacgacacccagcgtttatgggggtgctggaggccggggcatccgcatctccaactccagacacacggtgaactatgggagcgatctcacaggcggcggggacctgtttgttggcaatgagaaaatggccatgcagaacctaaatgaccgtctagcgagctacctagaaaaggtgcggaccctggagcagtccaactccaaacttgaagtgcaaatcaagcagtggtacgaaaccaacgccccgagggctggtcgcgactacagtgcatattacagacaaattgaagagctgcgaagtcaggtgagagatgatgcttgtgtttcctactctgtgtttagcttcaagataaatcaagaggttatctatgttaggtaggtccaaatggactttgtaaagcaaattaggctaaaatgttacatctataaaaattctttcatctacctttagtgctggagtacctgactgtacaataggatgaccttaaatcatgctatttttaatgtttaacacaattacatacaaaatatgaacattttatcctccggaataaaatgaatctttgtcacagcttatcacatcagggctaaatgtatagtgaacaatctttctgaaaagagctaaaaattaattacgtgataaatctctcttagtttttcacctagtccttatcaagttttgaaaccccagtaaattcaaagacttttctccttttatttaagtaaatgttataatatgactattagaatactgtactgcagatttaaatagcaaagtgattctgggtggaaacagtgtggcaggaatatgggtcttaatgatgcctggatttttaagtgccctgtttaataacatgaccatcagcatcaagcagttcagaaactacttctacagtaataaaatgttctattgcccccaattcatgtttattacaatcatatcacaacctcctcctatgtcatcaaaaaaagggtggagctctgtattttatcagtttcatggaataaaagcagaagactttgctcctaattgaaaatttcagatatgacacagagcacttgcttcaaattaaagttcttatctaattaagaaaagtgttcactgtaatttgtgttaagattcatactcctttagagcaaagcgcatttacttaccagcaagtctgtttttcttgagttgtactaaacatcagggcaatttgattcggactccatgggaagttactttggaattttagaaactataggcatgtgaagcaatggcatttaaatagcgccttccggaataaagttcatcctctgcaagctctcactaaaaatgttcgaaccacacctgtctcgtgtttctgactctagtttggttcatctgaaatacacagcacaggccatccgtcccattgagctggacagtcccaaccataggaagcagccctctccaaaactgggtccattgaaagagaaatgtcattgtaacatcttctgcaagtagatttttcatctatatgcctccatcatgcatttcgttctttcatgcatcatgttctttcattcagccaatactgaatgaacactaactaggtgctgggcaccatgctggggactgaggaatattatggtggacacaatatgatttatgaggatacagggatggacagagggaccagcacacagagggataatgagagcacaggcagatcatccagttcagttttgagagcatctgtgaaggctcctatgaagcaatgttgtcgaacctgagacatgagggaggaatgggagttcaccagaccacaggggctaaaagaaatgtcctaagtagaaacatcaaaggcaaggcactcaataaggtgtgatgactcaagttgagttaaattatccttctgtaaaatcacaagaaagtagaccaaaccctggggcatctagagttgcattttatgactctgttatgttaaataactatgtcattattttttctatatattttcatgtagaaatacttgaaatgaacatcatttttgacataatagtcactgtagctggggataaactaaatccttgtaaactcctatccagttgaaaatgtcattcttggccgggcacgtggctcacgcctgtaatcccagcactttgggaggccgaggcaggcagatcacctgaggtcagaacttcaagaccagcctggccaacatggcaaaatgctgtctctactaaaaatgcaaaaattagccgggcatggtggcggatgcctgtaaccccagctactcgggaggctgaggcaggataattgcttgaacctgggaggcagaggttacagtgagccgagattgtaccattgcactccagtctgggcaacagagcaagattctgtctcaataaataaataaataaataaataaataaataaataaataaataaaaaagaaaatgtcattctttctcatgtattttccagattaaggatgctcaactgcaaaatgctcggtgtgtcctgcaaattgataatgctaaactggctgctgaggacttcagactgaagtaggttccctaatacgtggcaaaagtttctgaaaaagaattcctttagtagtccttccagatactcagctttccatatcattgttgataaaggaagcacggttcaatgtccagaatcctgaagcctaaaggaggttagaagctacatgtatgaagctaacccagcactcagggatggccttctctttcttgatcccccggcatgtaactaaacacctccagtaactactattctccttggttattactggttgctaaatttttttttagtaacctggtatctaaacctaattctgccctttggagtaataacaaagtaatttacaattctccttctccctaagtgcctttctgttatctaaagagagtcttgtgtctacccttggtgattctccaagtaattctccacgttcattcaagtgcctgcaagtgtatgacccaagttccaggggtgactcttgatgatttctggcttgccagtgttttacaggatggtctggccaaccaaagaaccaggaccaatctataataattagctggcgtgatgccgtatgtctgtaatcccagctactccggaggctgaggcaggagaatcgcttgaacctgggaggcggaggtttcagtgagctgagatcgtgccattgcactgcaacctggggggcagactgagaccttgtctcaaaaaaaaaaaaaaggaagaaagaaagaaaagaaaaagaaagtaaaaattgtgttcactttctttgtagtcatcacaccacatgtgaccagacctgttccttgcaaacagcttccacactaaggcctcttcatcctgaatttgtacaatgcattaacaccaaaaagccctttgtggttagaagggtagccttttaatgctccaagggattaacaagaaggaaataggaaatcaaatccaaagatgaaagcagtaaaggtgcattacttccaattttacctagcactgagtgtcacattgcagtgtcattttttaaagttggatattttaggaaactgggcagggcatgcatgatcgtaacgcctgtaatcccagcactttgagaggctgaggcaggaggctcacttgagtcctggagtttgagaacagcttgggcaacgtggcaaaaccacatctctatacaaaaatacaaaaaaaattagctgggcatggtggcatacatctcgtgtcccagctacttgggaggctgaggtgagaggattgcttgagccccaaaggttgaggctgcagtgagccatgatcacaccattgtactccagcctgagtgacagagtgggaccctgtctcaaatacacacacacacacacacacacacaccacacacagtgtgtatgtaagattgtagaggaggatgtagagctgtttgagataattcactttggatgtctctgttcacaaagtaataaaaataaatcgatcatgtacattcattaagtaaaactaaccattatttaatatcaataataagaaccctttgccaacacaataattaacacaatttaatttcttataagataaattctagaatttagaagtgttcaaaattatttcagattgcctttttaccagtcaccccaaattatagagattatattattgagcacattttctgactcctaggttcttatgtaaatttcatgattgtgtaaaggcagacattataaagtattgaaattgatctcctcataagccacatttaaaaacctatcccattatattagattctctccttataatggcttcagaaggaccagttatctctgtacactaattaattcacaggtatgagactgagagaggaatacgtctaacagtggaagctgatctccaaggcctgaataaggtctttgatgacctaaccctacataaaacagatttggagattcaaattgaagaactgaataaagacctagctctcctcaaaaaggagcatcaggaggtgagaaaatattcagaagtggtattggaaacaatggaatggttctatataatactaataataggaggagcgggagaaacaggagaagggggaagagttggtggtgatagtgacagagatgatgacgatgacaataatgatacaagccctaccttcttttcataatgttgttgtaagttaaatgacttagagcagcacctggaccacaataagcccaacacaagttattattttatatcttttttacttattcccaatgaaagaggtcatgagactccttatgtcttttctgcccagccttatctgagaatgtgcttcagactaaaatcaatcagaaatttcactttcataggaagtcgatggcctacacaagcatctgggcaacactgtcaatgtggaggttgatgctgctccaggcctgaaccttggcgtcatcatgaatgaaatgaggcagaagtatgaagtcatggcccagaagaaccttcaagaggccaaagaacagtttgagagacaggtaaccacacaattctaaagggtgagcaaacgtgtagatgctttcctccagaaacagataactcattttctttttcatttgttcattcttcctttctctttctgtcttttctttcttatttccacccctcaactatttttttttcactcttggcactgtagactgcagttctgcagcaacaggtcacagtgaatactgaagaattaaaaggaactgaggttcaactaacggagctgagacgcacctcccagagccttgagatagaactccagtcccatctcagcatggtaaagcatatctaacttctctttctcaatctagtatgtgtttaccaaggtcctctgttaggaactatagaaatgcaaagacctacaagaaataacccttccccttgcagaactggcagggaaacaggccgaacaactgattataattaaaggacagagagaaatcgaggaaagggcaatgtactgcatgaatgcagaggaaagagtaaatctggaagatttcacagggaaagtggcatttaaaccagatctttttgtaacttttaagttcaggagtacatgtgcagatttatgatgtagttaaacttgtgtcatggggatttgttgtacaggttatttcatcactcaggtattaaacctaatacccattggttatttttcctgatcctctccctcctcctaccctccaccctctgttaggcccccatgtctgctattcccctgtatgtatccattataccagatctcaaaatctaagataaaattttaagatggagaatggactagagacattccaggccaagcaaatcagcaagcccatgacaaattatgttgtggtaagcagaatccctcaaaccacagtggcctgcagccatgatactacatccaccgtgacatttcctttccaagggcaaggctaaaggggtaggccctacctaggacatgccagtgtcctggcagaaagaaaagagcaatggttggtccacttgatagctcttaaagcttctccttagaaaaggcatttgtcctttgggaggccaaggcaggaggatcatttgaggtcaggaggttgagaccagctggccaatatggtgaaaccccatctctactaaagatacaaaaataagctgggcatggtggtgtgtgcctgtaatcccagctacttgggaggttgaggcaggagaatcgcttgaacccaggaggcagaggttgcagtgagctgtgatcacattactgcactccagcctgggcgacagagcaagactccgtcccaaaaaaaaaaaagaaaaagaaaaggcatttgtcagtttgacctgcattttattaaccaaagagagtcacatgacccagccaggtgtcaatggattaaaggaatctaatcctgcaattgagaaatgccacagatcacatggccaggtctgatgaaggagtgagaggtataacatcttcacacagtggggaagcaagtactgagaacaatgctacaatgcgccgcactgaaagaacagtaggtgcaaagctacaagcaaagaaaaaccccaagagctaatgatcctagctggctggctgaggttgcctagttgggaagagtgggagatggagctagaaatatacaccatgcccacagtgatgaactgcagagacccttctcaaaggaaattaaaattaacccatctcttgaatcaagtcctcacataagaagtgccctatttttcttgtgctcatagaaagagtctttggagcacactctagaggagaccaaggcccgttacagcagccagttagccaacctccagtcgctgttgagctctctggaggcccaactgatgcagattcggagtaacatggaacgccagaacaacgaataccatatccttcttgacataaagactcgacttgaacaggaaattgctacttaccgccgccttctggaaggagaagacgtaaagtaaggctcttagaatcaaggaataggtgtcaatatctgtatgcacttctattttaatgtccctgtcactcattacccagcaccaatgcaatccctaggacagaagcaattatactcacacatgcctcaccacgaacaacaaaacgaaaatataccaaaaaatacacacacgcccaaaatatcaagtacagccttgagatcatgtggtaggactgagttctaccacatgatcatttggagataattctccaaatgatatagattatgctgatattaattttcatcattaatatataattgaaggcataataaccttttggaaattctaattgagagctcatgaattagacaataagctgctgaggtccacgggagccagtctgagaatcataagtgtggcagcagcaactgtcttcagataccatacctaagaatatcaacaagagaacacaagatttaaacttccattgtaattttgttattttaattagaggaacttcttagcatatattaaactggtcagttttaaatctatgtatttttcaagttaaaaagtaaaatgctcaagtttgcaataaaagcaatgtaaaagggaaagatatatgaaagcaataacacattcacttggactttgaaatataaaagacaggagtgcattccattttcaaaacagcaataatgcttttttctgtttcttttttcttcttttcattaaaaaaaaaaacagaactacagaatatcagttaagcaccctggaagagagaggtaagttctaaatttttgcacattttctatgacattcagctgctttctattaactacatgccactgataaaaagtaaagtgaggctgttttagtctgttttctgctgctgtgacagaatacctgagactggataatttacaaacaatagacgtttacttggctcacagttctggaggccagaaagtccaatatcaaggtgccggcatcttgtaagggccttcttgctgtgtcatcccatggcagaaagtagaagtgcaaaagagtgtccatgagaaccagagagcaagaggaggctaatctttcttttagaactagcccactctcacaataactaacccattatcatggtaaccacattaatccatccatgagagaagagccctcatcatctaatcaccttttactaggccgcacctcccaacactgttacattggggattaagttttccacacatgaactccagggaacacattcaaaccatagcaaaggccaattctcaagggagcagatatgacaccagggattctaaaaatcttgtacatggcataaagaaaccctccacatgggaacttgggcacactcctcagaatggggtgattttcttggcctgtgctattgctatcttgaaacatcctgacatcctgaaaaggaaaaacaagacaaaatttgaattccacttaaattcaagataatttatttcttgaatttttaagagtaggacatttgtaaatttggggagaagcacattttctgcatctatttataaaatggacttaagattttttgagaaagaggatgggtttaacatatttttctaaaagaaggaaataagtaaaaagaataataatttaaagttgaataatataaatcagcagagtcatgtgcctgaattaacatttaatgtttaatatgaattcagatataaagaaaaccaggaagattaagacagtcgtgcaagaagtagtggatggcaaggtcgtgtcatctgaagtcaaagaggtggaagaaaatatctaaatagctaccagaaggagatgctgctgaggttttgaaagaaatttggctataatcttatctttgctccctgcaagaaatcagccataagaaagcactattaatactctgcagtgattagaaggggtggggtggcgggaatcctatttatcagactctgtaattgaatataaatgttttactcagaggagctgcaaattgcctgcaaaaatgaaatccagtgagcactagaatatttaaaacatcattactgccatctttatcatgaagcacatcaattacaagctgtagaccacctaatatcaatttgtaggtaatgttcctgaaaattgcaatacatttcaattatactaaacctcacaaagtagaggaatccatgtaaattgcaaataaaccactttctaattttttcctgtttctgaattgtaaaaccccctttgggagtccctggtttcttattgagccaatttctgggttaatcttattgatttttcagcatcagtacaactctacaacctttgagctatatctgctttttcccattgcttccactgccttttaaaactcaacacagctttttgaataatttgagagtcaaattcaatcacaaatgctgagacgaataagagtgaagtacactatacttaaaatggaaatagattaaaaacaacattactgaaacccttcgcaaggcaaaatgtgtctccttttgataataagctgcatatactatcaggtcctctctttctttatatggtgaacatatatttttaatgaaatgtctctcatttttttaataacagatttattgagatataattcacacaccatgaaattcacccttacaaaacgtacaattcagtggtcttcagtatgcttacaatgttttgcaaccatcaccactatctagttttagaacacttcatcaccccaaaaggaaatcttgtacctattagtagtcaccgccttttcccttcctcccagcccctaacaaccactaatctacttcctgtctctacggatttgcctactctggacatttcatataaataggttaatacgatgtgtccttttatacacaaatgttcatagcagcattactcataaaagccccaaagcgaaacacctcaagtgtccatcaaccgatgaatggataaacaaaatataatatatccacacaatagaatcttattcgtcaataaaaaggaatgaagtactgatacatgctataacagagatgaacttcgaaaacatgctaagtgaaagaagccaaatccaaaaacaataaaaacacatattgtatcctcaccctttttgcattttagtgagcaatcattgcatatgaatgtttatgggaaaaatcaatgtgtgctaaatcattgtattccagtaaatagattggacttaaaacttgatacagaagttgcaaataagtgggattgagtttgattattatatagaaaataattacatgattcatttaagaataataatatccaccatttattgagcacttactatgagcctgtgtgccaaacatttcatgcatttctcatttaattctcacaataatcctgtgaggtagaagctattaggttgaatcatatgaacttgccaatatatgataatttctaagagttgggaatttttgaggatgtgaatggtaccactttgaattcctaagatgtaatataatatctaacacatagcaggcacttgattcattattttaaattgaaagaataaagttttttaagctttccaatatatgataatttctgactttcagaaatagcaattttatatgctattatatagcatatataataaggttcagccttattatgttacccccactttacatatgaggataaatgaggactcatatgaagacatgagataaagactttcccaaagtcaagcagttaccaagtagtagagcgagactgaacctcagcgctgtttctctaaaaccaggacaccctcataagcaactaattacataacaaagcaatacatgattcacagttgaaataggcacttgctatccgcagttattttgttgttttctaattgtcattttcatcagccagacacaacagccaattgtggcaaatgtccagctttggctcgtaacatcacacatgacttgattcagtacaacttttgtcagaaaaggtattctcacctattctcattgccttcttttccaaagtgaagagatttcactcatttttttcttaattttcttccaagtcacgctagctagtaagttgcatttaaagatgttaagaatatttaaaagtgaattctttttcacctactgagtcacattccagaatagtctgaaactttgacatgcaaataccagactgtgaatctgattaataagaaacctatgcagatgggtttgtaactgattaggcctgaccactgttatatggcaatgatgacactgtgttaaaagaggtaggattgttattcttaatttaggatggtcctcttttaactacctgttaaaagaagtagaattgttatttttagatcagaaaaatgaagattttttcttcctcttgcttctttggtctgtctctagtttcttccaagcaatctttcaaagaagtgagtgagagctacatacatgtggaccagatggtggagttctacctccagttctgccagcagttactgtgtgaaagtgaagcattaatctttgtatctatctatatttctgatatgagctaagaactagaatgacataatcctatttctgacaggtaaacagatccagagagaagtctttatcacacattagaattatcatcaatgtattttttcattttatatgaaattgtcagtgcagaagtgaagctatcaaactcagagagagcccctagaggtgaggttaggatggaaataactattttttctgagctctggagattatttctacccagagttctgaatcatctaaaaaggagaatgacatggagtgatacaaaatcaaaacatggccagtgacctcctcagacactctgttctcatccacatgcatcaggatcagcctcaggtacctgattagacccccaagtaacaattccaacttaaagcattagtagtgatttttatttttgaattctctttcaaacatctctgttttctctcccctaggctcatttccaagattcctctcatcagggtattattttatcatcttcctgtctcctaccactttcaaaattctcccctgctttcaagaaccattgatctctggagcccagaagtcaatctcactcataccccttaggtccttgtttaaccctcatctcaaaagcacaatacataaaatgtaggcaacccaaaattctctcagtcactcacaggattttataatgttatccaaagtgaaagatgttacagatcaagggatcagcgagttgcagaaaatgacaggtctgtcttacgggaaaaaactcaggtagaaaaccctgcaaagaccaggacagaaaccaacctgacatgaaaagatgagggtatgatttactcaataaaaatctaaagacttgtaaaaaccacataactaattttctctattttgaacatttcctaaactctacaaaaatggaagatataattcttttgaacagtttgccctggctataatcattttcctctctgcctcaacttatgcaatcactctgccaacaagcccaagattgtttattgttttttacatcaccactgccttatgcattaatgtggctgtcaaagaaaattattttcacttctaaaacctctaaagcagagtcttgattatttaacttagcctcccacttaaaaaaaaaaaagccactgaagaagaaatatttcccttttcaacttctgaagttgctccccattcataactgaattcagaataaatattggtcaaagcataccagtaaattagggcacagtcattttcaaatgaaatgaatttcaaatgacacattcaaacacattaagacttaacttctttcaaatgaaatcattcaaggagtgcagtgataaagttcagcgaaacactaggctaggactcaggataaaaaataaattagatgtagtacctacctaacaagcttagtctaggataatatgttatatgtatagaaacataaacaaataatatataaacataatttttagagattgagcaatattatttaaattttaccataggcattagagttggaaagtgtacctttcagcacaaaatcaattccaagttcaaaaattcaacttaatcatattcccgtattatgtgatcgagtcgactccctttagtgagggttaattgagctc

SEQ ID NO: 311 - DNA, 2834 bp, Homo sapiens
tcggagcctgcggagggtggtggtggtggtggtggtggccctcgcccgcctcactcatgcctcctcctcctctgctctcgctcaggcgcctcggtggcggttggtcggcggttacgcggctggtggtcgcggcggccggggctcgctctcggggaggccggggcggatctcgcggcgcaggcggcggcggccgaggtggggtcgcgcggcggaggcggctcgagcttcgtgctgcgcgctcgctcttgggctcctcgctgcaggaggagtgtgactatgtgcagatgatcgaggtgcagcacaagcagtgcctggaggaggcccagctggagaatgagacaataggctgcagcaagatgtgggacaacctcacctgctggccagccacccctcggggccaggtagttgtcttggcctgtcccctcatcttcaagctcttctcctccattcaaggccgcaatgtaagccgcagctgcaccgacgaaggctggacgcacctggagcctggcccgtaccccattgcctgtggtttggatgacaaggcagcgagtttggatgagcagcagaccatgttctacggttctgtgaagaccggctacaccattggctacggcctgtccctcgccacccttctggtcgccacagctatcctgagcctgttcaggaagctccactgcacgcggaactacatccacatgcacctcttcatatccttcatcctgagggctgccgctgtcttcatcaaagacttggccctcttcgacagcggggagtcggaccagtgctccgagggctcggtgggctgtaaggcagccatggtctttttccaatattgtgtcatggctaacttcttctggctgctggtggagggcctctacctgtacaccctgcttgccgtctccttcttctctgagcggaagtacttctgggggtacatactcatcggctggggggtacccagcacattcaccatggtgtggaccatcgccaggatccattttgaggattatggtctgctcaggtgctgggacaccatcaactcctcactgtggtggatcataaagggccccatcctcacctccatcttggtaaacttcatcctgtttatttgcatcatccgaatcctgcttcagaaactgcggcccccagatatcaggaagagtgacagcagtccatactcaaggctagccaggtccacactcctgctgatccccctgtttggagtacactacatcatgttcgccttctttccggacaattttaagcctgaagtgaagatggtctttgagctcgtcgtggggtctttccagggttttgtggtggctatcctctactgcttcctcaatggtgaggtgcaggcggagctgaggcggaagtggcggcgctggcacctgcagggcgtcctgggctggaaccccaaataccggcacccgtcgggaggcagcaacggcgccacgtgcagcacgcaggtttccatgctgacccgcgtcagcccaggtgcccgccgctcctccagcttccaagccgaagtctccctggtctgaccaccaggatcccagcccaagcggcccctcccgccccttcccactcgcagcagacgccggggacagaggcctgcccgggcgcgccagccccggccctgggctcggaggctgcccccggccccctggtctctggtccggacactcctagagaacgcagccctagagcctgcctggagcgtttctagcaagtgagagagatgggagctcctctcctggaggatgcaggtggaactcagtcattagactcctcctccaaaggccccctacgccaatcaagggcaaaaagtctacatactttcatcctgactctgccccctgctggctcttctgcccaattggaggaaagcaaccggtggatcctcaaacaacactggtgtgacctgagggcagaaaggttctgcccgggaaggtcaccagcaccaacaccacggtagtgcctgaaatttcaccattgctgtcaagttcctttgggttaagcattaccactcaggcatttgactgaagatgcagctcactaccctattctctctttacgcttagttatcagctttttaaagtgggttattctggagtttttgtttggagagcacacctatcttagtggttccccaccgaagtggactggcccctgggtcagtctggtgggaggacggtgcaacccaaggactgagggactctgaagcctctgggaaatgagaaggcagccaccagcgaatgctaggtctcggactaagcctacctgctctccaagtctcagtggcttcatctgtcaagtgggactctgtcacaccagccattcttatctctctgtgctgtggaagcaacaggaatcaagagactgccctccttgtccacccacctatgtgccaactgttgtaactaggctcagagatgtgcacccatgggctctgacagaaagcagatcctcaccctgctacacatacaggatttgaactcagatctgtctgataggaatgtgaaagcacggactcttactgctaacttttgtgtatcgtaaccagccagatcctcttggttatttgtttaccacttgtattattaatgccattatccctgaattccccttgccaccccaccctccctggagtgtggctgaggaggcctccatctcatgtatcatctggataggagcctgctggtcacagcctcctctgtctgcccttcaccccagtggccactcagcttcctacccacacctctgccagaagatcccctcaggactgcaacaggcttgtgcaacaataaatgttggcttggaaaaaaaaaaaa

SEQ ID NO: 312 - DNA, 10660 bp, Homo sapiens
ctactacagtggcggacgtacaggacctgtttcactgcagggggatccaaaacaagccccgtggagcaacagccagagcaacagcagctgcaagacattgtttctctccctctgcccccccttccccacgcaaccccagatccatttacactttacagttttacctcacaaaaactactacaagcaccaagctccctgatggaaaggagcatcgtgcatcaagtcaccagggtggtccattcaagctgcagatttgtttgtcatccttgtacagcaatctcctcctccactgccactacagggaagtgcatcacatgtcagcatactggagcatagtgaaagagtctattttgaagcttcaaacttagtgctgctgcagaccaggaacaagagagaaagagtggatttcagcctgcacggatggtcttgaaacacaaatggtttttggtctaggcgttttacactgagattctccactgccaccctttctactcaagcaaaatcttcgtgaaaagatctgctgcaaggaactgatagcttatggttctccattgtgatgaaagcacatggtacagttttccaaagaaattagaccattttcttcgtgagaaagaaatcgacgtgctgttttcatagggtatttctcacttctctgtgaaaggaagaaagaacacgcctgagcccaagagccctcaggagccctccagagcctgtgggaagtctccatggtgaagtataggctgaggctacctgtgaacagtacgcagtgaatgttcatccagagctgctgttggcggattgtacccacggggagatgattcctcatgaagagcctggatcccctacagaaatcaaatgtgactttccgtttatcagactaaaatcagagccatccagacagtgaaacagtcaccgtggaggggggacggcgaaaaatgaaatccaaccaagagcggagcaacgaatgcctgcctcccaagaagcgcgagatccccgccaccagccggtcctccgaggagaaggcccctaccctgcccagcgacaaccaccgggtggagggcacagcatggctcccgggcaaccctggtggccggggccacgggggcgggaggcatgggccggcagggacctcggtggagcttggtttacaacagggaataggtttacacaaagcattgtccacagggctggactactccccgcccagcgctcccaggtctgtccccgtggccaccacgctgcctgccgcgtacgccaccccgcagccagggaccccggtgtcccccgtgcagtacgctcacctgccgcacaccttccagttcattgggtcctcccaatacagtggaacctatgccagcttcatcccatcacagctgatccccccaaccgccaaccccgtcaccagtgcagtggcctcggccgcaggggccaccactccatcccagcgctcccagctggaggcctattccactctgctggccaacatgggcagtctgagccagacgccgggacacaaggctgagcagcagcagcagcagcagcagcagcagcagcagcagcatcagcatcagcagcagcagcagcagcagcagcagcagcagcagcagcagcagcacctcagcagggctccggggctcatcaccccggggtcccccccaccagcccagcagaaccagtacgtccacatttccagttctccgcagaacaccggccgcaccgcctctcctccggccatccccgtccacctccacccccaccagacgatgatcccacacacgctcaccctggggcccccctcccaggtcgtcatgcaatacgccgactccggcagccactttgtccctcgggaggccaccaagaaagctgagagcagccggctgcagcaggccatccaggccaaggaggtcctgaacggtgagatggagaagagccggcggtacggggccccgtcctcagccgacctgggcctgggcaaggcaggcggcaagtcggttcctcacccgtacgagtccaggcacgtggtggtccacccgagcccctcagactacagcagtcgtgatccttcgggggtccgggcctctgtgatggtcctgcccaacagcaacacgcccgcagctgacctggaggtgcaacaggccactcatcgtgaagcctccccttctaccctcaacgacaaaagtggcctgcatttagggaagcctggccaccggtcctacgcgctctcaccccacacggtcattcagaccacacacagtgcttcagagccactcccggtgggactgccagccacggccttctacgcagggactcaaccccctgtcatcggctacctgagcggccagcagcaagcaatcacctacgccggcagcctgccccagcacctggtgatccccggcacacagcccctgctcatcccggtcggcagcactgacatggaagcgtcgggggcagccccggccatagtcacgtcatccccccagtttgctgcagtgcctcacacgttcgtcaccaccgcccttcccaagagcgagaacttcaaccctgaggccctggtcacccaggccgcctacccagccatggtgcaggcccagatccacctgcctgtggtgcagtccgtggcctccccggcggcggctccccctacgctgcctccctacttcatgaaaggctccatcatccagttggccaacggggagctaaagaaggtggaagacttaaaaacagaagatttcatccagagtgcagagataagcaacgacctgaagatcgactccagcaccgtagagaggattgaagacagccatagcccgggcgtggccgtgatacagttcgccgtcggggagcaccgagcccaggtcagcgttgaagttttggtagagtatcctttttttgtgtttggacagggctggtcatcctgctgtccggagagaaccagccagctctttgatttgccgtgttccaaactctcagttggggatgtctgcatctcgcttaccctcaagaacctgaagaacggctctgttaaaaagggccagcccgtggatcccgccagcgtcctgctgaagcactcaaaggccgacggcctggcgggcagcagacacaggtatgccgagcaggaaaacggaatcaaccaggggagtgcccagatgctctctgagaatggcgaactgaagtttccagagaaaatgggattgcctgcagcgcccttcctcaccaaaatagaacccagcaagcccgcggcaacgaggaagaggaggtggtcggcgccagagagccgcaaactggagaagtcagaagacgaaccacctttgactcttcctaagccttctctaattcctcaggaggttaagatttgcattgaaggccggtctaatgtaggcaagtagaggcagcgtgggggaaaggaaacgtggctctcccttatcatttgtatccagattactgtactgtaggctaaaataacacagtatttacatgttatcttcttaattttaggtttctgttctaaccttgtcattagagttacagcaggtgtgtcgcaggagactggtgcatatgctttttccacgagtgtctgtcagtgagcgggcgggaggaagggcacagcaggagcggtcagggctccaggcatccccggggaagaaaggaacggggcttcacagtgcctgccttctctagcggcacagaagcagccgggggcgctgactcccgctagtgtcaggagaaaagtcccgtgggaagagtcctgcaggggtgcagggttgcacgcatgtgggggtgcacaggcgctgtggcggcgagtgagggtctctttttctctgcctccctctgcctcactctcttgctatcggcatgggccgggggggttcagagcagtgtcctcctggggttcccacgtgcaaaatcaacatcaggaacccagcttcagggcatcgcggagacgcgtcagatggcagatttggaaagttaaccatttaaaagaacatttttctctccaacatattttacaataaaagcaacttttaattgtatagatatatatttccccctatggggcctgactgcactgatatatattttttttaaagagcaactgccacatgcgggatttcatttctgctttttactagtgcagcgatgtcaccagggtgttgtggtggacagggaagcccctgctgtcatggccccacatggggtaaggggggttgggggtgggggagagggagagagcgaacacccacgctggtttctgtgcagtgttaggaaaaccaatcaggttattgcattgacttcactcccaagaggtagatgcaaactgcccttcagtgagagcaacagaagctcttcacgttgagtttgcgaaatctttttgtctttgaactctagtactgtttatagttcatgactatggacaactcgggtgccacttttttttttttcagattccagtgtgacatgaggaattagattttgaagatgagcatatattactatctttaagcatttaaaaatactgttcacactttattaccaagcatcttggtctctcattcaacaagtactgtatctcactttaaactctttggggaaaaaacaaaaacaaaaaaaactaagttgctttctttttttcaacactgtaactacatttcagctctgcagaattgctgaagagcaagatattgaaagtttcaatgtggtttaaagggatgaatgtgaattatgaactagtatgtgacaataaatgaccaccaagtactacctgacgggaggcacttttcactttgatgtctgagaatcagttcaaggcatatgcagagttggcagagaaactgagagaaaagggatggagaagagaatactcatttttgtccagtgtttttctttttaagatgaacttttaaagaaccttgcgatttgcacatattgagtttataacttgtgtgatattcctgcagtttttatccaataacattgtgggaaaggtttgggggactgaacgagcataaataaatgtagcaaaatttctttctaacctgcctaaactctaggccattttataaggttatgttcctttgaaaattcattttggtctttttaccacatctgtcacaaaaagccaggtcttagcgggctcttagaaactctgagaattttcttcagattcattgagagagttttccataaagacatttatatatgtgagcaagattttttttaaacaattactttattattgttgttattaatgttattttcagaatggctttttttttctattcaaaatcaaatcgagatttaatgtttggtacaaacccagaaagggtatttcatagtttttaaacctttcattcccagagatccgaaatatcatttgtgggttttgaatgcatctttaaagtgctttaaaaaaaagttttataagtagggagaaatttttaaatattcttacttggatggctgcaactaaactgaacaaatacctgacttttcttttaccccattgaaaatagtactttcttcgtttcacaaattaaaaaaaaaatctggtatcaacccacattttggctgtctagtattcatttacatttagggttcaccaggactaatgatttttataaaccgttttctggggtgtaccaaaaacatttgaataggtttagaatagctagaatagttccttgactttcctcgaatttcattaccctctcagcatgcttgcagagagctgggtgggctcattcttgcagtcatactgcttatttagtgctgtattttttaaacgtttctgttcagagaacttgcttaatcttccatatattctgctcagggcacttgcaattattaggttttgtttttctttttgttttttagcctttgatggtaagaggaatacgggctgccacatagactttgttctcattaatatcactatttacaactcatgtggactcagaaaaacacacaccaccttttggcttacttcgagtattgaattgactggatccactaaaccaacactaagatgggaaaacacacatggtttggagcaataggaacatcatcataatttttgtggttctatttcaggtataggaattataaaataattggttctttctaaacacttgtcccatttcattctcttgcttttttagcatgtgcaatactttctgtgccaatagagtctgaccagtgtgctatatagttaaagctcattcccttttggctttttccttgtttggttgatcttccccattctggccagagcagggctggagggaaggagccaggagggagagagcctcccacctttcccctgctgcggatgctgagtgctggggcggggagccttcaggagccccgtgcgtctgccgccacgttgcagaaagagccagccaaggagacccgggggaggaaccgcagtgtcccctgtcaccacacggaatagtgaatgtggagtgtggagaggaaggaggcagattcatttctaagacgcactctggagccatgtagcctggagtcaacccattttccacggtcttttctgcaagtgggcaggcccctcctcggggtctgtgtccttgagacttggagccctgcctctgagcctggacgggaagtgtggcctgttgtgtgtgtgcgttctgagcgtgttggccagtggctgtggaggggaccacctgccacccacggtcaccactcccttgtggcagctttctcttcaaataggaagaacgcacagagggcaggagcctcctgtttgcagacgttggcgggccccgaggctcccagagcagcctctgtcaccgcttctgtgtagcaaacattaacgatgacaggggtagaaattcttcggtgccgttcagcttacaaggatcagccatgtgcctctgtactatgtccactttgcaatatttaccgacagccgtcttttgttctttctttcctgttttccatttttaaactagtaacagcaggccttttgcgtttacaatggaacacaatcaccaagaaattagtcagggcgaaaagaaaaaaataatactattaataagaaaccaacaaacaagaacctctctttctagggatttctaaatatataaaatgactgttccttagaatgtttaacttaagaattatttcagtttgtctgggccacactggggcagaggggggagggagggatacagagatggatgccacttacctcagatcttttaaagtggaaatccaaattgaattttcatttggactttcaggataattttctatgttggtcaacttttcgttttccctaactcacccagtttagtttgggatgatttgatttctgttgttgttgatcccatttctaacttggaattgtgagcctctatgttttctgttaggtgagtgtgttgggttttttccccccaccaggaagtggcagcatccctccttctcccctaaagggactctgcggaacctttcacacctctttctcagggacggggcaggtgtgtgtgtggtacactgacgtgtccagaagcagcactttgactgctctggagtagggttgtacaatttcaaggaatgtttggatttcctgcatcttgtggattactccttagataccgcatagattgcaatataatgctgcatgttcaagatgaacagtagctcctagtaatcataaaatccactctttgcacagtttgatctttactgaaatatgttgccaaaatttatttttgttgttgtagctctggattttgttttgttttgttttttaaggaaacgattgacaataccctttaacatctgtgactactaaggaaacctatttctttcatagagagaaaaatctccaatgcttttgaagacactaataccgtgctatttcagatatgggtgaggaagcagagctctcggtaccgaaggccgggcttcttgagctgtgttggttgtcatggctactgtttcatgaaccacaagcagctcaacagactggtctgttgccttctgaaaccctttgcacttcaatttgcaccaggtgaaaacagggccagcagactccatggcccaattcggtttcttcggtggtgatgtgaaaggagagaattacactttttttttttttaagtggcgtggaggcctttgcttccacatttgtttttaacccagaatttctgaaatagagaatttaagaacacatcaagtaataaatatacagagaatatacttttttataaagcacatgcatctgctattgtgttgggttggtttcctctcttttccacggacagtgttgtgtttctggcatagggaaactccaaacaacttgcacacctctactccggagctgagatttcttttacatagatgacctcgcttcaaatacgttaccttactgatgataggatcttttcttgtagcactataccttgtgggaatttttttttaaatgtacacctgatttgagaagctgaagaaaacaaaattttgaagcactcactttgaggagtacaggtaatgttttaaaaaattgcacaaaagaaaaatgaatgtcgaaatgattcattcagtgtttgaaagatatggctctgttgaaacaatgagtttcatactttgtttgtaaaaaaaaaaagcagagaagggttgaaagttacatgtttttttgtatatagaaatttgtcatgtctaaatgatcagatttgtatggttatggcctggaagaattactacgtaaaaggctcttaaactatacctatgcttattgttatttttgttacatatagccctcgtctgagggaggggaactcggtattctgcgatttgagaatactgttcattcctatgctgaaagtacttctctgagctcccttcttagtctaaactcttaagccattgcaacttctttttcttcagagatgatgtttgacattttcagcacttcctgttcctataaacccaaagaatataatcttgaacacgaagtgtttgtaacaagggatccaggctaccaatcaaacaggactcattatggggacaaaaaaaaaaaaaattatttcaccttctttccccccacacctcatttaaatggggggagtaaaaacatgatttcaatgtaaatgcctcattttattttagttttattttgatttttatttaatataaagaggccagaataaatacggagcatcttctcagaatagtattcctgtccaaaaatcaagccggacagtggaaactggacagctgtggggatattaagcacccccacttacaattcttaaattcagaatctcgtcccctcccttctcgttgaaggcaactgttctggtagctaactttctcctgtgtaatggcgggagggaacaccggcttcagtttttcatgtccccatgacttgcatacaaatggttcaactgtattaaaattaagtgcatttggccaataggtagtatctatacaataacaacaatctctaagaatttccataacttttcttatctgaaaggactcaagtcttccactgcagatacattggaggcttcacccacgttttctttccctttagtttgtttgctgtctggatggccaatgagcctgtctccttttctgtggccaatctgaaggccttcgttggaagtgttgttcacagtaatccttaccaagataacatactgtcctccagaataccaagtattaggtgacactagctcaagctgttgtcttcagagcagttaccaagaagctcggtgcacaggttttctctggttcttacaggaaccacctactctttcagttttctggcccaggagtggggtaaatcctttagttagtgcatttgaacttggtacctgtgcattcagttctgtgaatactgccctttttggcggggtttcctcatctccccagcctgaactgctcaactctaaacccaaattagtgtcagccgaaaggaggtttcaagatagtcctgtcagtatttgtggtgaccttcagattagacagtcttcatttccagccagtggagtcctggctccagagccatctctgagactccgtactactggatgttttaatatcagatcattacccaccatatgcctcccacaggccaagggaaaacagacaccagaacttgggttgagggcactaccagactgacatggccagtacagaggagaactagggaaggaatgatgttttgcaccttattgaaaagaaaattttaagtgcatacataatagttaagagcttttattgtgacaggagaacttttttccatatgcgtgcatactctctgtaattccagtgtaaaatattgtacttgcactagcttttttaaacaaatattaaaaaatggaagaattcatattctattttctaatcgtggtgtgtctatttgtaggatacactcgagtctgtttattgaattttatggtccctttctttgatggtgcttgcaggttttctaggtagaaattatttcattattataataaaacaatgtttgattcaaaatttgaacaaaattgttttaaataaattgtctgtataccagtacaagtttattgtttcagtatactcgtactaataaaataacagtgccaattgcaaaaaaaaaaaaaaaaaaaaaaaaaaaaaaaaaaaaaaaaaaaaaaaaaaaaaaaaa

SEQ ID NO: 313 - DNA, 1008 bp, Homo sapiens
cccgaattttccggctcgaatgcccggcagccgtggcggctagagcgttcctccccagctcgaatgcccggcggcgaggcggctagagcgtcgcctcctcccggggaaccgcgtgtgaccttccagcccgcggaccgatgctgccggcggccgctcgccccctgtgggggccttgccttgggcttcgggccgctgcgttccgccttgccaggcgacaggtgccatgtgtctgtaccgtgcgacatatgaggagcagcggccatcagaggtgtgaggccctcgctggtgcacccctggataacgcccccaaggagtacccccccaagatacagcagctggtccaggacatcgccagcctcactctcttggaaatctcagacctcaacgagctcctgaagaaaacgttgaagatccaggatgtcgggcttgtgccgatgggtggtgtgatgtctggggctgtccctgctgcagcagcccaggaggcggtggaagaagatatccccatagcgaaagaacggacacatttcaccgtccgcctgaccgaggcgaagcccgtggacaaagtgaagctgatcaaggaaatcaagaactacatccaaggcatcaacctcgtccaggcaaagaagctggtggagtccctgccccaggaaatcaaagccaatgtcgccaaagctgaggcggagaagatcaaggcggccctggaggcggtgggcggcaccgtggttctggagtagcctccagctcggaggacttgtgttcaggggtcctgggccccggcgaggtcccgccctcccgtggtcactggctccgcccccagcaccaggcgcccagtggagccgtttgggagaattgcctgcgccacgcagcgggccggacaggccgcacagacctactgtggcgggagggaggggcggctgctgcctggtgacggcacccggaagcccaccaggacgcgccaccggtcaatgtgcctctggtggctgctgagaaaaatacactgtgcagctc

SEQ ID NO: 314 - DNA, 3701 bp, Homo sapiens
cggaaatcatcctagtaataaagtgaaatcagacccacaacgaatgaatgaacagccacgtcagcttttccaaagctcatgaacactggaaaacaacatacgtttgttgaaacagagagtgtaagatatgtctaccagcctatggagaaactgtatatggtactgatcactaccaaaaacagcaacattttagaagatttggagaccctaaggctcttctcaagagtgatccctgaatattgccgagccttagaagagaatgaaatatctgagcactgttttgatttgatttttgcttttgatgaaattgtcgcactgggataccgggagaatgttaacttggcacagatcagaaccttcacagaaatggattctcatgaggagaaggtgttcagagccgtcagagagactcaagaacgtgaagctaaggctgagatgcgtcgtaaagcaaaggaattacaacaggcccgaagagatgcagagagacagggcaaaaaagcaccaggatttggcggatttggcagctctgcagtatctggaggcagcacagctgccatgatcacagagaccatcattgaaactgataaaccaaaagtggcacctgcaccagccaggccttcaggccccagcaaggctttaaaacttggagccaaaggaaaggaagtagataactttgtggacaaattaaaatctgaaggtgaaaccatcatgtcctctagtatgggcaagcgtacttctgaagcaaccaaaatgcatgctccacccattaatatggaaagtgtacatatgaagattgaagaaaagataacattaacctgtggacgagacggaggattacagaatatggagttgcatggcatgatcatgcttaggatctcagatgacaactatggccgaattcgtcttcatgtggaaaatgaagataagaaaggggtgcagctacagacccatccaaatgtggataaaaaacttttcactgcagagtctctaattggcctgaagaatccagagaagtcatttccagtcaacagtgacgtaggggtgctaaagtggagactacaaaccacagaggaatcttttattccactgacaattaattgctggccctcggagagtggaaatggctgtgatgtcaacatagaatatgagctacaagaagataatttagaactgaatgatgtggttatcaccatcccactcccgtctggtgtcggcgcgcctgttatcggtgagatcgatggggagtatcgacatgacagtcgacgaaataccctggagtggtgcctgcctgtgattgatgccaaaaataagagtggcagcctggagtttagcattgctgggcagcccaatgacttcttccctgttcaagtttcctttgtctccaagaaaaattactgtaacatacaggttaccaaagtgacccaggtagatggaaacagccccgtcaggttttccacagagaccactttcctagtggataagtatgaaattctgtaataccaagaagagggagctgaaaaggaaaattttcagattaataaagaagacgccaatgatggctgaagagtttttcccagatttacaagccactggagaccccttttttctgatacaatgcacgattctctgcgcgcaaggaccctcgactcacccccatgtttcagtgtcacagagacattctttgataaggaaatggcacaaacataaagggaaaggctgctaattttctttggcagattgtattggccagcaggaaagcaagctctccagagaatgcccccagttaaatacctcctctacctttacctaagttgctcctttatttttattttattattattattattattattattttttgagatggagtctcactttgtaacccaggctggaatgcaatggcatgatctcagctcactgcaacctccgcctcctgggttcaagcaagtctcctgcctcagcctccgagtagctgggactacaggtgcacgccaccacgcctggctaattttttgtattttagtagagacggggtttcaccgtgttgcccaggctggtcgcgaactcctgagctcaggcaatccgcccacctcagcctcccaaagtgttgggattacaggcatgagccaccatgcccagctgctcctttattttaatccctaaatataatccctaaatatagttatatttcatacttagtttgtttttaaaaagttttctctgtagaaaattttaatcattcataccctttacctttaggtttttctttctatacattcagtcaggcactgggatcatctgtttacaggcattatatttatttggcactcctggaacaagtatatctaacccattcttgatttttggactattcaggtgaactatttgaggggtatggggtctagaagttaaaagatacgcatgtcttctrttcttttcccgtatcaattcattccttcatctctttgccaagttgttttcctttcagggcctgtccttccagtttagaacagtaccatgaatcccacttgtgtcaatattaaagatagctgagaagcacctttcaaatggcacagtccctcttcaagatgtctaaaagaatggttatgtctgtccagttagggatttcacatccacatgtaatcatgtctgctgctgttgctacccaaattttcatttctccacattttgggtacttaagctaaaacgtaatggccacagtctgtaatccattcacattcctcagtttcaccacctccctcttccagactgcactctctgtcatcagtcccctcctttctaacagaaatggggttatgattttgaaggctgtgggttcagggagtctttgccaatcctgttggccctaaactatcaaggaggctccatttcaccatttgattttttgcatttcaggaggcaactgattgtttcgatatgtacatattactcacgtataccccatttccttccagtcagcccaacattttccaccagtctgtccccatctctgaaatccttccttctctttccccctaagtcttttgagtgtcatcatgtactggtggtttctcggttccatctcatccatttccttttcaatggagactacagcgtcagccagctcagccttggcttttaactcaatattccagtccataggggtggttaaaagttgctgcaaggctgcaggcactggcagtgggaagaggcagacgactagatgacttctgcacttttagctggttgaaaagtaccactcccactctgaacatctggccgtccctgcaaagagtgtactgtgcttgaagcagagcactcacacataaatggctgtgtgtggaattgcttgccaaagaagtttctagcctttccctttcccctaactgcatcagggaagaattcttatctctagcttggtttccacatgaggtttttctgagaagggcttgggacaagaagtctgtcatgttagttaagcaggcaagaaatcctactaatccagttttgtttgaaagttgtttgtccgtatgattttttaaaagtcaagtttaatttcaaaaaaccttttttttctgagattacttttggggtaatatttaaaatgagagacattttgtaaccctgtaaaatacatagggaatataacattccagtgtatacaaagaaggcaaattccaaaaaaaaaaaaaaaaaaaaaa

SEQ ID NO: 315 - DNA, 1530 bp, Homo sapiens
aattaaatggacaacaccgttagatgtgtatgtaaaaattttctgtttcatatttttcctttcactttcggtttagaacatgctatatgtactgtatgtcctgtggcccagtgcggctccacagcatggaatctgatgtatgatatgatagaatgtggcactaaatgcagtttcagattttatttttttaatcatatgaactaaaattgtcaattgtgagttgtgctttctcatcatgttggttatattgcacaattggttatatttatgacctgatattcaaagactctggcattgatagccagtgtgttttcttatttaactccgtttactacattctacatggtgtttacgtgatccacacttgaaatactagatcagtagacattcactaatataccaaaataaaatgaaaaattgagtttttccgtgaactttatactgtccagctctgttgattttaaagcttcttcatccaggtcagttcaggaagtatatctggagtacctggctctgtttttggctgtgagactagcactaaggattctggtacctttacccaaacctactgggctactaatacttctctcagcagttgaatcaaatacaatagaccatgtaagctggggccgctcatccacttccagtttgctggtctccctgctagaagacacattgtactgtgctttttctggaattcacgataatggcatcactgcctgtttttcacatcttttgtttcctgttcattttaaggaaacctactaaatccagttaatattaaatggacaccactcattaagaaatttctttatggcttctgcctgaatacttaaaatgccttactacagttatccagttgacatgtttttaattcatataaggtatattgggtatattgaagtatatattgtattacaaagacttgttcttgtattttaaaatgtcagtgcaaaaaatatatggtggaacctttctttaaagttgaaatgcagtattatttaaatctgaaaggttaaaaagctttcttcaccttatatatgttcttccactgtgactttttagttgaagactagtaaattaacttttagttagaagatgcctactgcttttgttgtttattttaatcagcagagcacagagacacataaaaactctgggaaatgactaggataaaaatatcagtatgtatctgttttagatattttgagttttgctttttttatgccttgaatattttatttcaaaaagtatctgaagcaaattctcagactgaactacttcttagacctcactgtaagaatattttattcaatgtctcatttatgatagatttgcaagctgctcatttttgaacagctttttgcatgggataggagcatgtctattctaacacatcagcttattcaaaagcaagaattttaaaaataagataaatgtaaagttgttttataaacgatcctgttaattaaaccacagacaccatatatccttctgcatcctttggccaataaaagttgctggagaacc

SEQ ID NO: 316 - DNA, 3461 bp, Homo sapiens
ggagcgcccggctgcgctggagccgcccggagctaggggctccccggggcgcaggagagacgtttcagagcccttgcctccttcaccatgccggttgccgccaccaactctgaaactgccatgcagcaagtcctggacaacttgggatccctccccagtgccacgggggctgcagagctggacctgatcttccttcgaggcattatggaaagtcccatagtaagatccctggccaaggtgataatggtattgtggtttatgcagcagaatgtctttgttcctatgaaatacatgctgaaatactttggggcccatgagaggctggaggagacgaagctggaggccgtgagagacaacaacctggagctggtgcaggagatcctgcgggacctggcgcagctggctgagcagagcagcacagccgccgagctggcccacatcctccaggagccccacttccagtccctcctggagacgcacgactctgtggcctcaaagacctatgagacaccaccccccagccctggcctggaccctacgttcagcaaccagcctgtacctcccgatgctgtgcgcatggtgggcatccgcaagacagccggagaacatctgggtgtaacgttccgcgtggagggcggcgagctggtgatcgcgcgcattctgcatgggggcatggtggctcagcaaggcctgctgcatgtgggtgacatcatcaaggaggtgaacgggcagccagtgggcagtgacccccgcgcactgcaggagctcctgcgcaatgccagtggcagtgtcatcctcaagatcctgcccaactaccaggagccccatctgccccgccaggtatttgtgaaatgtcactttgactatgacccggcccgagacagcctcatcccctgcaaggaagcaggcctgcgcttcaacgccggggacttgctccagatcgtaaaccaggatgatgccaactggtggcaggcatgccatgtcgaagggggcagtgctgggctcattcccagccagctgctggaggagaagcggaaagcatttgtcaagagggacctggagctgacaccaaactcagggaccctatgcggcagcctttcaggaaagaaaaagaagcgaatgatgtatttgaccaccaagaatgcagagtttgaccgtcatgagctgctcatttatgaggaggtggcccgcatgcccccgttccgccggaaaaccctggtactgattggggctcagggcgtgggacggcgcagcctgaagaacaagctcatcatgtgggatccagatcgctatggcaccacggtgccctacacctcccggcggccgaaagactcagagcgggaaggtcagggttacagctttgtgtcccgtggggagatggaggctgacgtccgtgctgggcgctacctggagcatggcgaatacgagggcaacctgtatggcacacgtattgactccatccggggcgtggtcgctgctgggaaggtgtgcgtgctggatgtcaacccccaggcggtgaaggtgctacgaacggccgagtttgtcccttacgtggtgttcatcgaggccccagacttcgagaccctgcgggccatgaacagggctgcgctggagagtggaatatccaccaagcagctcacggaggcggacctgagacggacagtggaggagagcagccgcatccagcggggctacgggcactactttgacctctgcctggtcaatagcaacctggagaggaccttccgcgagctccagacagccatggagaagctacggacagagccccagtgggtgcctgtcagctgggtgtactgagcctgttcacctggtccttggctcactctgtgttgaaacccagaacctgaatccatccccctcctgacctgtgaccccctgccacaatccttagcccccatatctggctgtccttgggtaacagctcccagcaggccctaagtctggcttcagcacagaggcgtgcactgccagggaggtgggcattcatggggtaccttgtgcccaggtgctgcccactcctgatgcccattggtcaccagatatctctgagggccaagctatgcccaggaatgtgtcagagtcacctccataatggtcagtacagagaagagaaaagctgctttgggaccacatggtcagtaggcacactgccccctgccacccctccccagtcaccagttctcctctggactggccacacccaccccattcctggactcctcccacctctcacctctgtgtcggaggaacaggccttgggctgtttccgtgtgaccaggggaatgtgtggcccgctggcagccaggcaggcccgggtggtggtgccagcctggtgccatcttgaaggctggaggagtcagagtgagagccagtggccacagctgcagagcactgcagctcccagctcctttggaaagggacagggtcgcagggcagatgctgctcggtccttccctcatccacagcttctcactgccgaagtttctccagatttctccaatgtgtcctgacaggtcagccctgctccccacagggccaggctggcaggggccagtgggttcagcccaggtaggggcaggatggagggctgagccctgtgacaacctgctgttaccaactgaagagccccaagctctccatggcccacagcaggcacaggtctgagctctatgtccttgaccttggtccatttggttttctgtctagccaggtccaggtagcccacttgcatcagggctgctgggttggaggggctaaggaggagtgcagaggggaccttgggagcctgggcttgaaggacagttgccctccaggaggttcctcacacacaactccagaggcgccatttacactgtagtctgtacaacctgtggttccacgtgcatgttcggcacctgtctgtgcctctggcaccaggttgtgtgtgtgtgcgtgtgcacgtgcgtgtgtgtgtgtgtgtgtcaggtttagtttggggaggaaccaaagggttttgttttggaggtcactctttggggcccctttctgggggttccccatcagccctcatttcttataataccctgatcccagactccaaagccctggtcctttcctgatgtctcctcccttgtcttattgtccccctaccctaaatgcccccctgccataacttggggagggcagttttgtaaaataggagactccctttaagaaagaatgctgtcctagatgtacttgggcatctcatccttcattattctctgcattccttccggggggagcctgtcctcagaggggacaacctgtgacaccctgagtccaaacccttgtgcctcccagttcttccaagtgtctaactagtcttcgctgcagcgtcagccaaagctggcccctgaaccactgtgtgcccatttcctagggaaggggaaggagaataaacagaatatttattacaaaaa

SEQ ID NO: 317 - DNA, 925 bp, Homo sapiens
gaattccaagatcctggcctgtgcagctcgggtttccgagcttctgcctcaggcatctccgcgatctcctctcccctccaatcctatccgtgatggacgatgcccacgagtcgccctccgacaaaggtggagagacaggggagtcggatgagacggccgctgtgcccggggacccgggggctaccgacaccgatggaatcccagaggaaactgacggagacgcagatgtggacttgaaagaagctgcagcggaggaaggcgagctcgagagtcaggatgtctcagatttaacaacagttgaaagggaagactcatcattacttaatcctgcagccaaaaaactgaaaatagataccaaagaaaagaaagagaaaaagcagaaagtagatgaagatgagattcagaagatgcaaatcctggtttcttctttttctgaggagcagctgaaccgttatgaaatgtatcgccgctcagctttccctaaggcagccatcaaaaggctgatccagtccatcactggcacctctgtgtctcagaatgttgttattgctatgtctggtatttccaaggttttcgtcggggaggtggtagaagaagcactggatgtgtgtgagaagtggggagaaatgccaccactacaacccaaacatatgagggaagccgttagaaggttaaagtcaaaaggacagatccctaactcgaagcacaaaaaaatcatcttcttctagaccaaagtctagaaaggcctatgttactgacggaagaagtattggttccagacttcctataagactgtctgcattggtgctttagtatctcaggcctccaaggattccatgatgattttaatgtctttctcaaaactctgatatttgtcacacctagaaagtatgtagcctgattgatacttggcttgactaaattt

SEQ ID NO: 318 - DNA, 1172 bp, Homo sapiens
ctttccgggagactggagtcgaaggccgtgagtattttctaagccagtgtttagagagtatgtgaggcaagagtacctatagaacccggaggagggtgaggagcagagctggccataatggcaggtgaagaaattaatgaagactatccagtagaaattcacgagtatttgtcagcgtttgagaattccattggtgctgtggatgagatgctgaagaccatgatgtctgtttctagaaatgagttgttgcagaagttggatccacttgaacaagcaaaagtggatttggtttctgcatacacattaaattcaatgttttgggtttatttggcaacccaaggagttaatcctaaggaacatccagtaaaacaggaattggaaagaatcagagtatatatgaacagagtcaaggaaataacagacaagaaaaaggctggcaagctggacagaggtgcagcttcaagatttgtaaaaaatgccctctgggaaccaaaatcgaaaaatgcatcaaaagttgccaataaaggaaaaagtaaaagttaactttttggttttgatgtacacatattcaaaaagtacattaatatgtaatcacagtaatatgtaaagctaaatacttcctctccaaagatcattatctttattgattagcactgaggattttaacattgtgatatattatatatttataatttaccatctcttgatgagactcttatttctttatataggtcagtcttgcaagtaccattttataagcagctgtgaaatttaagtgaaatgttctttgtaaacatttgtactattttaaatgaataatgaccttatgaagtatgctatctgtaggctgaaattataggtacatctgttttcactatatgatattaagaaagcgtgaaatgacttaaatgttcatttttttctgtatagatactttatcatgttttcatgattttaggaattactgctttgttgatattcaaagtgtgaaactaaaagtttatggttgtactttaattcttggcatgttgcctctatgtcccatttaaaataaaatacattctcattaactttagatgggaaataaggttgtatgttgatggatgaattttggcatgatgactgtactctcaataaaggctgaaaatgttgtaaaaaaaaaaaaaaaaaaa

SEQ ID NO: 319 - DNA, 4237 bp, Homo sapiens
cagctcggtcgcccccaccggccccatggcagcccccggcgccccagctgagtacggctacatccggaccgtcctgggccagcagatcctgggacaactggacagctccagcctggcgctgccctccgaggccaagctgaagctggcggggagcagcggccgcggcggccagacagtcaagagcctgcggatccaggagcaggtgcagcagaccctcgcccggaagggccgcagctccgtgggcaacggaaatcttcaccgaaccagcagtgttcctgagtatgtctacaacctacacttggttgaaaatgattttgttggaggccgttcccctgttcctaaaacctatgacatgctaaaggctggcacaactgccacttatgaaggtcgctggggaagaggaacagcacagtacagctcccagaagtccgtggaagaaaggtccttgaggcatcctctgaggagactggagatttctcctgacagcagcccggagagggctcactacacgcacagcgattaccagtacagccagagaagccaggctgggcacaccctgcaccaccaagaaagcaggcgggccgccctcctagtgccaccgagatatgctcgttccgagatcgtgggggtcagccgtgctggcaccacaagcaggcagcgccactttgacacataccacagacagtaccagcatggctctgttagcgacaccgtttttgacagcatccctgccaacccggccctgctcacgtaccccaggccagggaccagccgcagcatgggcaacctcttggagaaggagaactacctgacggcagggctcactgtcgggcaggtcaggccgctggtgcccctgcagcccgtcactcagaacagggcttccaggtcctcctggcatcagagctccttccacagcacccgcacgctgagggaagctgggcccagtgtcgccgtggattccagcgggaggagagcgcacttgactgtcggccaggcggccgcagggggaagtgggaatctgctcactgagagaagcactttcactgactcccagctggggaatgcagacatggagatgactctggagcgagcagtgagtatgctcgaggcagaccacatgccgccatccaggatttctgctgcagctactttcatacagcacgagtgcttccagaaatctgaagctcggaagagggttaaccagcttcgtggcatcctcaagcttctgcagctcctaaaagttcagaatgaagacgttcagcgagctgtgtgtggggccttgagaaacttagtatttgaagacaatgacaacaaattggaggtggctgaactaaatggggtacctcggctgctccaggtgctgaagcaaaccagagacttggagactaaaaaacaaataacagaccatacagtcaatttaagaagtaggaatggctggccgggcgcggtggctcacgcctgtaatcccagcactttgggaggccaaggcgggcggatcacgaggtcaggagttcgagaccagcctgaccaacatggtttgctgtggaatttgtcatctaatgacaaactcaagaatctcatgataacagaagcattgcttacgctgacggagaatatcatcatccccttttctgggtggcctgaaggagactacccaaaagcaaatggtttgctcgattttgacatattctacaacgtcactggatgcctaagaaacatgagttctgctggcgctgatgggagaaaagcgatgagaagatgtgacggactcattgactcactggtccattatgtcagaggaaccattgcagattaccagccagatgacaaggccacggagaattgtgtgtgcattcttcataacctctcctaccagctggaggcagagctcccagagaaatattcccagaatatctatattcaaaaccggaatatccagactgacaacaacaaaagtattggatgttttggcagtcgaagcaggaaagtaaaagagcaataccaggacgtgccgatgccggaggaaaagagcaaccccaagggcgtggagtggctgtggcattccattgttataaggatgtatctgtccttgatcgccaaaagtgtccgcaactacacacaagaagcatccttaggagctctgcagaacctcacggccggaagtggaccaatgccgacatcagtggctcagacagttgtccagaaggaaagtggcctgcagcacacccgaaagatgctgcatgttggtgacccaagtgtgaaaaagacagccatctcgctgctgaggaatctgtcccggaatctttctctgcagaatgaaattgccaaagaaactctccctgatttggtttccatcattcctgacacagtcccgagtactgaccttctcattgaaactacagcctctgcctgttacacattgaacaacataatccaaaacagttaccagaatgcacgcgaccttctaaacaccgggggcatccagaaaattatggccattagtgcaggcgatgcctatgcctccaacaaagcaagtaaagctgcttccgtccttctgtattctctgtgggcacacacggaactgcatcatgcctacaagaaggctcagtttaagaagacagattttgtcaacagccggactgccaaagcctaccactcccttaaagactgaggaaaatgacaaagtattctcggctgcaaaaatccccaaaggaaaacacctatttttctactacccagcccaagaaacctcaaaagcatgccttgtttctatctttctctatttccgtggtcccctgaatccagaaaacaaatagaacataattttatgagtcttccagaagacctttgcaagtttgccaccagtagataccggccacaggctcgacaaatagtggtctttgttattagggcttatggtagatggcttcctggaatcaaaatgtgaattcatgtggaagggacattaatccaataaataaggaaagaagctgttgcattactgggattttaaaagtttgatttacatttatattccttttctggttcccatgttttgtcactcatgtgcacattgcttcgccattgggcctccagtgtattgttctgcagtgttgaaacagaatggaaatgacaagaaatatctgcagttatccaggagaaagtataatggcaaaattattggtttctttctttactttgtgcttgtttttatccccttggttgtttttctctgatttttaaataaacttaagaaatttagattacagagtatgcatgactgtaagaaaaagaaattgagaggaagtgatcatagcaaattaaagaagtcttttcctcccagaacttaaagtaaaataaaaaataaataaataaataaaatcttttccacagagaaaggcaactgtgatgataaaatttaagctcccccaacactgagtcaatgagatttttctcaggagatactttacctataacaacgccgttaaatccaaatctcttctaaacgatggcattctatgtaatgcctttcctggacttttttggccactgcctggactagtgaaagaatggactctatctttatctgcaagaggaactaaggccttctatcagactgcctggccagcctggggcactgaaaatacggctcatgttaatgagttacattatcagccagcccagccttgcccaccatttaagaaatatcacagagccactagatctcatatgatcttcttcaagccattattttaactcaagaaaactctagagaagaaaagtgaagaagtcatgttgaagaagatgtaagaatgtgtcaagaccatccagaaatgatatgagaaatactgatattttaaatggttgacatcatccagcgaaatgaatctacattaaatgttgttttaactgcgctatgattaaaaccattcatatagagttagtctttacaactactattctgttatttttttttttaatctgacaacatttgtcctaagtaagataagcaaaaaaattcttcaactccttttggcaagaaaactgtaacagaaaataaattttgaatgtgtacttaagtctttattatatttgaagcaattttttttcaattttaaaagctgaatgaagacaacttaggttgctaacctagttcaaaatgaaattatttagataccaatttttaaaatactggagagaatttatatgtctttttccagagttctgatgataagca

SEQ ID NO: 320 - DNA, 6492 bp, Homo sapiens
gaattcaagtcttgttcctgcacattccaccctggagaaatctggggcaagtgactgttccccgggccttagcttctcctgtcactgggacatcacaacagcacctaccttagggcaactcaggccagggaagttggtgctgcctcacctcccaatgtgcgtcctcctgggcctggagcctcagggcctctggaaggaggaagtgagcgcctctgggcaggattcctgggaggcctgggagagcaagggaagcgccaagagctgagcagagttctgggactgatccatggccctttctctctcacctttcaggaggtgggccccctccacccccagcacttcccacctggtcggtcccgaacggcccctccccggaggaggtggagcagcagaaaaggtggggctgggccctgggtggggaaccttagccgctgccagagttccatatgttctggaacccttgactcctagagttcagaacccagccaacttgcagttttcagaatgttcaagaaacttctgacactcagagttgcagaacctcctggtccctgcagattcctggaaatcagaatatggtggttgaaagaatcttgtggctgggcgtggtggctcacgcctgtaatcccagcactctgggaggccgaggcgggcagatcgcctgaggtcaggagtttgagaccagcctggccaacatggcgaaatcccgtctctactgaagataacaaaaattagccggtcatggtggcgcccgtgcctgtaatcccagctcggcaggccgaggcaggagaatcgcttgaacccgggaggcagaggttgcagtgagccaagatcgagccactgcactccagcctgggtgacagagtctcaaaaaaaaaaaaagaaaagaaagaatcttgggcattttgtaattcggtgttcctgacagtttagtgactgggatctcgcatcctgatctctccctgtcgctgccctgccctccattccccctactctcacccagcccccttcttggttccctaggggaggaaggcttgggtgagtattaggagccagccaccctggagacctctgagagagaggacggaggtcgctggccccttcgctggccatccttaggaccctgattgacggcagctctctcgcctccccccacaggcagcagcccggcccgtcggagcacatagagcgccgggtctccaatgcaggtgatgctcagatagcttcgggagttgggagggggcctccctggaggaagtggccagccagctggacagtgaagaatgaggcttctctctctcagctgcccccttttctgtgtttgtttcaggaggcccacctgctccccccgctgggggtccacccccaccaccaggacctccccctcctccaggtccccccccacccccaggtttgcccccttcggggtcccagctgcagcgcacggagcagggggaggaccaccccctgcaccccctctcccggcagcacagggccctggtggtgggggagctggggccccaggcctggccgcagctattgctggagccaaactcaggaaagtcagcaaggtgaggggccgggagaggtgggcagggggcaacagggcttttatgggggatgaggccagggctgccggcggtgtcattgggctggaaggccaaaaggcctgcccctaaagctcctgccccttttaaatttctccagcaggaggaggcctcaggggggcccacagcccccaaagctgagagtggtcgaagcggaggtgggggactcatggaagagatgaacgccatgctggcccggaggtgagcctgagcctggacccccaagtcacctggagttccagttcagtagggcccagtcagaggagggctccaattcctgtttagtttgtttcttttggtgaatgttccccctttgataaccaggtttgggatataatggtggggtttgtcatgaaatgcctgaggcttgcaaccacctaggtagcctgtagatgttctaaaacccagaattctagaaccgtaggagatctttcctcagaattctgggaactcaggttcctgcaatctcagtgttccaacacagcaccgctccaccctcggaatcttactgttccctaatataagaatcatagaacctcctccaccctgattctagaaccacaatctcttgaattttttttttttttttttttttttttttgagatggagtcttgctctgtcacccaggctggagtgcagtggtatgatctcggtccactgcaacctccgcctcctgggttcaggcagttcttctgcctcagcctcctaagtagccgggattacaggcatgagtcaccacacccggctaatttttgtatttttagtagacacaggatttcaccatgttggccaggctggtcttgaactcttgacctcaagagatccacctgcttcagcctctcaaagtgttggcattacaggccactgcgcccagcacaatctcttgaatttctaaaactagagtttccttaggttttcggagttccagaattctatgcgctaggatctacatttctagaactcccctcagaaggggatgggttgggtgacggaagcacgtgtttttgcttttctctcctgcagaaggaaagccacgcaagttggggagaaaacccccaaggatgaatctgccaatgtaagtcagggactcttcttgccctacatctcttaggccgtaccatgagggtagggatagtgggatgtgtggggtttgaacctgaaagaggaaatgggcagaggtgtggcaggggctggctcatggcagttttatttcctaccagcaggaggagccagaggccagagtcccggcccagagtggtgagtagagtgcccagtccagccacaggaactacaaatcccagaatactctgttctcacatgttaagcacccttataggagagtcagggcgaatggtgctggggattgtagtctcctgagatggggctttgatcaggggctgatgaggttgggggagtaagattgattggggggcagtcttttgtccctgatctttctgatttcttgcctatccccagaatctgtgcggagaccctgggagaagaacagcacaaccttgccaaggtaggccatcggtcctggggcccttggggaggtaaaggcgggcagatcgcttgagcccaggaggtcaagaccagcctgggcaacatggcgacaccccatctctacaaaaattagccaggcgtggtagcacttacctgtggtcccagctactcaggaggctgaggtgggaggattacttgagcccaggaagttgaggcctcagcgagccatcatcatgcctgcactccagcctgagaaatagaatgtgactgtctcaaaacaaaacacaacaaaccaaaaccaaaaaaaaaaaaaactggggccccaaaaatacttggacttgcccaatttataaggcagagctcaatgtgatccctggaataggaggcggggaagcaggtcctctctctaatctcattgctgtcccaaaccacaccaactcccccaggatgaagtcgtcttcttcggtgaccacttccgagacccaaccctgcacgcccagctccagtgattactcggacctacagagggtgaaacaggtaacttgggggggaagttggggaccacagcaagagagatctaggtctggcccctgccactggcatgccgtatgatcctagataacatctcagaaacctcaggtttccaatctgacaaatggagaaactggattgggtcaaggatgaccgagactccacacccccttttctggcacctgtgacagacattattaatctatcaccgcgctcattccagatgagtgccttgaattctttccgcacattgacccagctgtccatcaccaattggagttggcaggaggctggaatgcgcttgccaaccttggtactggatgttctccagtacttttccggctccaaggatccagaattctcccctagaatcctccagtcactctgcgaccttgacagcgatgtcatggtgtcgatgtaggggtaggtctcaaacctactccccctggcttttccatcaacaagaaagaggggactctggcagggcacggtggctcatgtgtgtaatttcagcacattgcgaggctgaggtgggagcattgcttgaggccaggagtttgagaccagcctggggcaacatcgggagacccccatctctaaaaataacttttaaaagttacctgagaaggccaggtgcggtggctcatgcctgtaatcccagcactttgggaggccgaggtgggtggatcacctgaggtcaggggttcaagaccagcctggccaacatggtgaaacccatcgctactaaaaatacaaaaattaggctgggaatggtggctcacagccataatcccagcagtttggaaggctgatggggacggatcacgtgaagtcaaaagttcgagaccagcctggccaacatggcgaaaccctgtctctactaaaaatacaaaaattagctgggccttgtggggggcacctgtaatccagttatttgggcggctgaggcaggagaatcgcttgaacccgggagccagagattgcagtcagccgagattgggccactgcactgcagtctgggtgacagggagactctgtttcaaaaaaaaaaagaaaaagaaaaagttacctgattgtggcggcaggtgactgtggtcccagctacttgggaggctaaggcaggaggattacctgagcctgggaagttgaggctgcaatgagctgtgatcatgccattgcaccctagcctaggcaacagagcaaggttccttctcaaaaaataaaagaagggggattcattcctgcaagtcccggtacccctcctgattagttttaccccattaattttaggagcttctggaagaggtgaagaaggaattgcagaaagtgaaagaggaaatcattgaaggtgaggtggtttgctttggttttgttcttaaacatttacttattttggaggcatcatgtccctgggcaagagccctgttttggaagggaggaggcagagactctgcccctgacctctgctccttgtttccttccagccttcgtccaggagctgaggaagcggggttctccctgaccacagggacccagaagacccgcttctcctttccgcacacccggcctgtcaccctgctttccctgcctctacttgacttggaattggctgaagactacacaggaatgcatcgttcccactccccatcccacttggaaaactccaagggggtgtggcttccctgctcacacccacactggctgctgattggctggggaggcccccgcccttttctccctttggtccttcccctctgccatccccttggggccggtccctctgctggggatgcaccaatgaaccccacaggaagggggaaggaaggagggaatttcacattcccttgttctagattcactttaacgcttaatgccttcaaagttttggtttttttaagaaaaaaaaatatatatatatttgggttttgggggaaaagggaaatttttttttctctttggttttgataaaatgggatgtgggagtttttaaatgctatagccctgggcttgccccatttggggcagctatttaaggggaggggatgtctcaccgggctgggggtgagacatccccccaccccagggactccccttccctctggctccttccccttttctatgaggaaataagatgctgtaactttttggaacctcagttttttgattttttatttgggtaggttttggggtccaggccattttttttaccccttggaggaaataagatgagggagaaaggaaaaggggaggaaacttctcccctcccaccttcacctttagcttcttgaaaatgggcccctgcagaataaatctgccagtttttataaatgctaagatctctggagtgatttgaaggcctgttctgatggggatggaggtgtgctcggcccccggtgcccctccaggaagatttggtcctctgctgagaacccctgcctcctcccaggaatccaccttcccttcatcttccttcccaccctgcatattgcgcctgctcactcatcctcaggcccgcagccaggatgatctctgccccctccagcctccctccccatgccccttaggaggccacttcctccccatcccaccctgcccttcaccaccctaggggaggccagaagcagcctcactttgtgtagccttgggcaagtccatttgcttacctcaggcctcagtttctgatttgggaaagggctcataagatgattctctgcccccactctaccactctcccagcttctttcctcttttttttttttttttttttttaatgagttggggtcttgctctttcacccagtctggagtgtagtggcaggatcacagctcactgcagccttgaactcctggg

SEQ ID NO: 321 - DNA, 1040 bp, Homo sapiens
cgacgagccatggttgctgggagcgacgcggggcgggccctgggggtcctcagcgtggtctgcctgctgcactgctttggtttcatcagctgtttttcccaacaaatatatggtgttgtgtatgggaatgtaactttccatgtaccaagcaatgtgcctttaaaagaggtcctatggaaaaaacaaaaggataaagttgcagaactggaaaattctgaattcagagctttctcatcttttaaaaatagggtttatttagacactgtgtcaggtagcctcactatctacaacttaacatcatcagatgaagatgagtatgaaatggaatcgccaaatattactgataccatgaagttctttctttatgtgcttgagtctcttccatctcccacactaacttgtgcattgactaatggaagcattgaagtccaatgcatgataccagagcattacaacagccatcgaggacttataatgtactcatgggattgtcctatggagcaatgtaaacgtaactcaaccagtatatattttaagatggaaaatgatcttccacaaaaaatacagtgtactcttagcaatccattatttaatacaacatcatcaatcattttgacaacctgtatcccaagcagcggtcattcaagacacagatatgcacttatacccataccattagcagtaattacaacatgtattgtgctgtatatgaatggtattctgaaatgtgacagaaaaccagacagaaccaactccaattgattggtaacagaagatgaagacaacagcataactaaattattttaaaaactaaaaagccatctgatttctcatttgagtattacaatttttgaacaactgttggaaatgtaacttgaagcagctgctttaagaagaaatacccactaacaaagaacaagcattagttttggctgtcatcaacttattatatgactaggtgcttgctttttttgtcagtaaattgtttttactgatgatgtagatacttttgtaaataaatgtaaatatgtacacaagtg

SEQ ID NO: 322 - DNA, 863 bp, Homo sapiens
tagatatttttcaaaaatacagtgatgtcattgcaggacaattttatggacacactcacagagacagcattatggttctttcagataaaaaaggaagtccagtaaattctttgtttgtggctcctgctgttacaccagtgaagagtgttttagaaaaacagaccaacaatcctggtatcagactgtttcagtatgatcctcgtgattataaattattggatatgttgcagtattacttgaatctgacagaggcgaatctaaagggagagtccatctggaagctggagtatatcctgacccagacctacgacattgaagatttgcagccggaaagtttatatggattagctaaacaatttacaatcctagacagtaagcagtttataaaatactacaattacttctttgtgagttatgacagcagtgtaacatgtgataagacatgtaaggcctttcagatttgtgcaattatgaatcttgataatatttcctatgcagattgcctcaaacagctttatataaagcacaaatactagtatttcacagtttttgctaatagaaaatgctgattctgattctgagatcaatttgtgggaattttacataaatctttgttaattactgagtgggcaagtagacttcctgtctttgctttctttttttttttctttttgatgccttaatgtagatatctttatcattctgaattgtattatatatttaaagtgctcattaatagaatgatggatgtaaattggatgtaaatattcagtttatataattatatctaatttgtacccttgttgaaattgtcatttatacaataaagcgaattctttatctctaaaaaaaaaaaaaaaaaa

SEQ ID NO: 323 - DNA, 1157 bp, Homo sapiens
ccagctttctctcctttgaaaacactaagaataatgtcactgcatcagtttttactagagccaatcacctgtcatgcctggaacagggatcgtactcagattgccctcagtcccaataatcacgaagtgcacatctataagaagaacgggagccagtgggtgaaagctcatgaactcaaggagcacaacggacacatcacaggtattgactgggctcccaagagcgaccgtattgtcacttgtggggcagaccgcaatgcctatgtctggagtcagaaagatggtgtttggaagccaaccctggtgatcctgagaattaatcgcgcagctacttttgtgaagtggtcccccctagagaacaaatttgctgtgggaagtggagcacgactcatttctgtttgttactttgaggctgaaaatgactggtgggtgagcaagcacattaaaaagccgattcgctccacagtcctcagcttggattggcatcccaacaacgttttgctggcagcaggatcatgtgacttcaaatgcagagtgttttctgcctacattaaagaagtggatgaaaagaaagccagcacgccctggggcagcaagatgccttttgggcagctgatgtcagagtttggtggcagtggcactggtggctgggtccacggggtaagcttctctgccagtgggagccgcctggcctgggtcagccacgacagcaccgtgtctgttgctgatgcctcaaaaagtgtgcaggtctcgactctgaagacagagttcctgccgctcctaagtgtgtcatttgtctcagagaacagcgtcgtggctgctggccatgactgctgcccaatgctctttatctacgatgaccgcggctgcctgaccttcgtctccaagttagatattccaaaacagagcatccaacgcaacatgtctgccatggaacgcttccgcaacatggacaagagagccacaactgaggaccgcaacacggccttggagacgctgcaccagaatagcatcactcaagtctctatttatgaggtggacaagcaagattgtcgcaaattttgcactactggcatcgatggagccatgacaatttgggatttcaagaccctcgagtcttccatccagggcctccggataatgtgaagctgagtgga

SEQ ID NO: 324 - DNA, 974 bp, Homo sapiens
cggaaactggacactggaccggcagcgccatgagactcctcccccgcttgctgctgcttctcttactcgtgttccctgccactgtcttgttccgaggcggccccagaggctcgttagcagtggcacaagatcttacagaggatgaagaaacagtagaagattccataattgaggatgaagatgatgaagccgaggtagaagaagatgaacccacagatttggtagaagataaagaggaagaagatgtgtctggtgaacctgaagcttcaccgagtgcagatacaactatactgtttgtaaaaggagaagattttccagcaaataacattgtgaagttcctggtaggctttaccaacaagggtacagaagattttattgttgaatccttagatgcctcattccgttatcctcaggaccaccagttttatatccagaatttcacagctcttcctctgaacactgtagtgccaccccagagacaggcaacttttgagtactctttcattcctgcagagcccatgggcggacgaccatttggtttggtcatcaatctgaactacaaagatttgaacggcaatgtattccaagatgcagtcttcaatcaaacagttacagttattgaaagagaggatgggttagatggagaaacaatctttatgtatatgttccttgctggtcttgggcttctggttattgttggccttcatcaactcctagaatctagaaagcgtaagagacccatacagaaagtagaaatgggtacatcaagtcagaatgatgttgacatgagttggattcctcaggaaacattgaatcaaatcaataaagcttcaccaagaaggttgcccaggaaacgggcacagaagagatcagtgggatctgatgagtaaatgttcctttgtgcaacaattcggtctttacttaacctgccctaatatttttcggcctgatgggaattagtgcagagaagccaa

SEQ ID NO: 325 - DNA, 5487 bp, Homo sapiens
atggcctcaggagccggaggagtcggagggggcggtggcggcaagatccggacgcggcgttgccaccaggggccaattaagccttaccagcaggggcgacaacagcatcagggcattcttagcagggttacagaatctgttaagaatattgtgccagggtggttacaaagatacttcaacaagaatgaagatgtatgcagctgttcaacagacacaagcgaggttccacgctggccagaaaataaagaggaccatctggtatatgccgatgaggagagctctaatattactgatgggagaatcacacctgagccagcagtcagtaatacagaagaaccttcaacaactagtactgcttcaaattatccagatgtgttaacaaggccttctcttcatcggagccatctgaatttttccatgttggaatcccctgcattacactgtcagccatctacatcctcggcattcccaattggcagttcgggattttcccttgtaaaggaaattaaagattctacctctcagcatgatgatgataacatctcaactaccagtggtttttcttcaagagcttctgataaagatataactgtttcaaagaacacttcattgccacctctgtggtccccagaagctgaacgttctcactcactctcacagcacactgccaccagctcaaaaaaaccagcattcaacttgtctgcctttggaacactttccccttcacttgggaattcttcaatccttaaaaccagtcagcttggagattctcctttttatcctggaaaaacaacatacggtggggcagcagctgctgtaagacagtctaaactacgaaatacaccttatcaggcaccagttagaagacaaatgaaagctaagcaactcagtgcacaatcttacggtgtgaccagttcaacagctcggcgaatattgcagtctttagagaagatgtcaagccctttagcggatgcaaaaagaattccatccattgtttcttctcctctgaattctcctcttgataggagtgggatagatatcacagattttcaggccaaaagagaaaaggtggattctcaatatcctcctgttcagagacttatgaccccaaagccagtttccatagcaacaaatcgaagtgtttattttaaaccatctctgactccttctggtgaattcaggaagactaatcaaagaatagataacaagtgcagtactggatatgaaaaaaatatgacacccggacaaaatagagaacaacgagaaagtggcttttcatatccaaatttcagtttgcctgcagccaatggtttatcttctggagtaggtggtggaggtggcaagatgagacgagaaagacacgcctttgttgcttctaaacctctggaggaggaggaaatggaagttccagtattaccgaaaatctctctaccgatcaccagttcttcactgcctacctttaattttagttcccctgagatcacaacttcctctccatcacccatcaattcgtctcaagcattaacaaacaaggtacaaatgacctctccgagcagcactggcagtcccatgtttaaattttcatctccaatcgtaaaatctactgaggcaaatgtactacctccatcatctattggatttacatttagtgtgcctgttgcaaaaacagcagaactttctggttctagtagtactttagaaccaattataagtagttcagctcatcatgtcactacagtgaacagtacaaattgtaagaagacaccacctgaagattgtgagggtccttttagacctgcagaaatcctgaaagaaggaagtgttctagatattctgaaaagccctggtttcgcatcgccgaagatagattctgttgctgctcagcccaccgcaacaagcccagtagtttatacaagaccagcaataagtagcttttcttctagtggaattgggtttggggagagtttaaaagctgggtcatcatggcagtgtgatacatgtctactccagaacaaagttacagacaacaaatgcatagcctgtcaagcagcaaaattgtcacccagagatactgctaaacagactggaattgaaacaccaaataaaagtggcaaaacaactctttctgcatcagggacaggctttggagacaaatttaaaccagtgataggcacttgggattgtgatacctgtttagtgcaaaataaacctgaagcaataaaatgtgtagcctgtgaaacaccgaaacctggaacttgtgtgaagcgagcccttacattgacagtggtttcggaaagtgctgagactatgactgcttcatcttccagctgcactgtaaccactggtaccttaggatttggagataaattcaaaaggcccattggatcttgggagtgttcagtatgctgtgtttctaataatgcagaagacaataagtgtgtgtcctgtatgtctgagaaaccaggaagttcagtacctgcttcaagtagcagcactgtacctgtctctctgccttctggaggctctctaggattggaaaagttcaagaaacccgagggaagctgggactgtgaattgtgcctagtgcagaataaggcagactctaccaaatgtttggcatgtgaaagtgcaaagccaggcacaaaatctgggtttaaaggctttgacacatcttcctcatcttcgaactcagcagcctcctcatccttcaaatttggtgtctcatcatcctcttctgggccttctcagactttaacaagcactggaaattttaaatttggagatcagggaggattcaaaataggtgtgtcatctgattctgggtctataaaccccatgagtgaaggctttaaattttctaaaccaataggagattttaaatttggagtttcatctgaatctaagcccgaagaagttaaaaaagatagtaagaatgataattttaagtttggactttcttctggtttaagcaacccagtttctttaactccatttcaatttggggtatctaatcttggacaggaagaaaagaaagaggaactgcccaaatcttcctctgcaggttttagctttggtacaggtgttattaactccacccctgctcctgctaacaccatagtgacctctgagaacaagagcagcttcaaccttggaaccatagaaaccaagagtgcttcagtggctcctttcacatgtaagacatcagaagctaaaaaagaagaaatgcctgccaccaaaggaggattctcttttggcaacgtggagcctgcctctctgccatctgcctcagtgtttgttttgggaaggacagaagagaaacagcaagagcctgtcacttctacttccctagtttttgggaagaaagctgacaatgaagagccaaagtgtcaaccagtgttttcctttgggaattcagagcaaaccaaagatgagaattcttcaaagtccacatttagttttagtatgacaaaaccatctgagaaggaatctgaacagccagcaaaagccacttttgcctttggagctcaaactagtactacagctgatcaaggtgcagcaaagccagtttttagtttcttgaacaacagttcctctagttcaagtacaccagccacttctgctggtggtggcatatttggtagttccacctcttcctccaatccacctgtggctacctttgtgtttggacagtccagcaatcctgtgagcagctctgcctttggtaacactgctgaatccagcacctctcagtctttgctattttctcaagatagcaaactagcaaccacatccagcacaggtacagctgtcaccccatttgtctttggtccaggagccagcagtaataatactaccacctctggtttcggctttggagccacaaccacatctagctctgcaggatcctcctttgtatttggaactggaccctcagcaccatctgccagtccagcatttggtgctaaccagaccccaacatttggacaaagtcaaggtgccagccagcccaatcccccaggctttggatctatatcatcttccacagcattatttcccactggttctcagcctgcaccacctacttttgggacagtgtcaagcagtagccagccccctgtgtttggacagcaacctagtcagtctgcatttggctctggaacaactcctaattctagttcggctttccagtttggcagcagcactacaaatttcaacttcacaaacaacagtccatcaggagtgttcacatttggtgcaaattctagcacacctgcagcctcagcccagccttcaggctcggggggctttccatttaaccagtctccagcagcatttacagtggggtcaaatgggaaaaatgtgttctcttcttctggaacttcattctctggtcgcaagataaagactgctgttagacgcaggaaataaaggtcacattggtgttgtactcaattttaacaacagctggtgccctgctttcagatactggattgtactttgtgctggggttatctgaagtcagatctgcctaaggacttctttaattttggaattttcctcctttctctttcgttacagaagccccaccctgcctcacccacccttttttaaataaataaatagctagactggtgactgattcttcagcaaaaatattttatgatccagcagattattcactgatttgacatagtctggctgtacccaggaatggagcctgcacggtgaatggctttgtatagaacctctttgtctacaccattatgtgcgctgataacgttcatggaacgcgttgaaattgtaattatatctgaggaattctgtatagattagaattctgtatagattagagagtgttgaaacggatgatttctatgctgagtttgtgctggtgtatgtgtgaagtgagtgagttgggtgtattgtgcgctaaacttttctgatagaggaagcctgattaaagaatggtccgtgctaaggacttgttagatctagttcactctccatttaataattatatgctatttctatattttcattctcctatcacctgtcttgcctttttcattattttattatgaaacttgtgtaaatacaattttgtttctgtactttttggcataacataaatctgtgaacttgaaatttgaattttgtgttagagatttttttgttgtttgtttagtcttgtctcagattttattatgtaaatcccattattcaaagttgcctaaatccatttggaaatctttaaaaaaaaaattggggattcttaaagttgaatttattggcttttctgatccagttttgtttggaccaaaaaccagtattgtacaaagtattaagcatatatttttatatttactaaaatggtctgtggtgacttttggataataaggaaaagtttaatattaaagccatgtttattacagtataattaacatgttaaaccatgggataaatgccatcaataaaaaattatgacat

SEQ ID NO: 326 - DNA, 2640 bp, Homo sapiens
gggcggccaacgtgggctcgctcttcgacgacccagaaaacctgcagaagaactggcttcgggaattttaccaggtcgtgcacacacacaagccgcacttcatggccttgcactgtcaggagtttggagggaagaactacgaggcctccatgtcccacgtggacaagttcgtcaaagaactattgtcgagtgatgcgatgaaagaatataacagggctcgagtctacctggatgaaaactacaaatcccaggagcacttcacggcactaggaagcttttattttcttcatgagtccttaaaaaacatctaccagtttgactttaaagctaagaagtatagaaaggtcgctggcaaagagatctactcggataccttagagagcacgcccatgctggagaaggagaagtttcgcagactacttccccgagtgcaaatggtcaagaaaaggcttcatccggacgaggtggtgattgcagactgtgcctttgacttggtgaatatccatcttttccatgatgcttccaatctggtcgcctgggaaacaagcccttccgtgtactcgggaatccggcacaaggcactgggctacgtgctggacagaatcattgatcagcgattcgagaaggtttcctactttgtatttggtgatttcaacttccggctggattccaagtctgtcgtggagacgctctcagcaaaaccaccgatgcagacggtccgggccgccgacaccaatgaagtggtgaagctcatatttcgtgagtcggacaacgaccggaaggttatgctccagttagaaaagaaactcttcgactacttcaaccaggaggttttccgagacaacaacggcaccgcgctcttggagtttgacaaggagttgtctgtctttaaggacagactgtatgaactggacatctcgttccctcccagctacccgtacagtgaggacgcccgccagggtgagcagtacatgaacacccggtgcccagcctggtgtgaccgcatcctcatgtccccgtctgccaaggagctggtgctgcggtcggagagcgaggagaaggttgtcacctatgaccacattgggcccaacgtctgcatgggagaccacaagcccgtgttcctggccttccgaatcatgcccggggcaggtaaacctcatgcccatgtgcacaagtgttgtgtcgtgcagtgacgtggtgggaagagatgccagcgccacgagaggacacttcgtgagcctccctgtagccgtggaccgaatacgcactcttgaaagctgcatcgagaacccgcccaagcgccacctgctagacggccagccccacacttcgcttcagcctccggaccattccggagcagccccacatacctcactgtctcgtctgtctatgtgacattaagtagaaatattggtttttttttttttttaaataagtcacagtcctgttgtcaaaactctaatagacagcaaagagggtctgtaccgtagacttcacagttttcagtttttaatgattgccagtggaggggcttcttcagcacagagaccccccactgtgtccagggaccccctctgccaggtggaggtgtgtccaggggctggggaagccgagacgggcactccctctgccggccggcagcgtggccctgagcatggcaagggggtctgtctctgccgatgctccttccgcggcactgactctgcgccgtgtcacatggtttttgaatcacactgcagctgctttccatttttatatatatataaatatatataaatatatactttttaaaaataatttataaatcttaccaaaacttatgctaaatatactttccagtatgaacgcacaggagagtcccatcagcaggcggcattggagtctaggagctcagctgtgtgtccatcaacacacaaattcgtaaaaaacacacatggcctcgccatcgtgggtaaaatcggccccacagcacgtctgcaccagcgggccgttactcccatgccgttcttctgtgtaatattaagaactgaatgtgaagtttatagctagcctgggtgtaccttttaagaattttgtaaaccgtttgtctgtcttttgttactgttttatggtgccaagtatcctacgttacaacaataatatcatgggagaaatagaaatagcctagtttgcttccaatagaaactgcttttaacatgggctgtatataaaaatattaaagagaaacaaaactgtacatttcctcattgctccgctacagacaacccatgtcataaccttgttgcaaatatttttctcctatagcagtaagtacagcattagaaggtgattagagagtctgttgatgaaacacaaatgtatgtttttattgatttttactttagaacactacagagttcctgggaccggggtgaaggcattagctgggtgtttgtgtgggataaatactaccactgcaagtgactgctgtccgctgcggaatctgttcttggtggaagcacaggtccgtgtcgctgctgtggttgccgctgtccgcggttcaacacggagtccgccccgcgggtttcagctgttggtcgttctgaggggcctttggaagtgaccggtctggttcctaagcaataaaattgaccgtggtga

SEQ ID NO: 327 - DNA, 307 bp, Homo sapiens
ggaattttgtaagatttattgagaatagaacaggcttcctgtcccctaaccctgtggtggatcctgagaagagggaagcctaggtctgggtggtgtgggctggaggcctacccacctgcaaatggggactcccaggcccccgcgggtgcatacagtgaacaaagtaattgctctcccctatcacccctgatccttacctgcctggcccccaaggtctcctggggaccagagatccctgcatagccaggagccagcctggcccacctcaaggggcaggaagcaagggtagcactgtggaacctgtttt

SEQ ID NO: 328 - DNA, 287 bp, Homo sapiens
ctcagggataataaatctattttaataacgttacttttgacaacgatttgtacatgtatttaaagataacaactttcaacccccacccttaccccagactcccattacaaattgaggcatgacctgcccttgccaggaagtgagcaaagctgcaacatcaaaactctgcacatcccactctcagaggagggtgactttacactgtgttgggaaaaataactaagcatttaaatttttcattgtacacctgtacattggtttagattgaatggctcaaattaaacaaa

SEQ ID NO: 329 - DNA, 1619 bp, Homo sapiens
ggcacgagcccgctgcccgtggccgtcgcactgccgagccagggggcagtatgaagaccacattcaccatcgagatcaaggacggccgtggcaggcctccacaggccgggtgctgctgcccacaggcaaccagagggcagaactgacactggggctgcgggcgccccgaccctactcagcaccagtagtggggcaagagcaccatcacccgtgtcaacagccctgggaccctggctcggctgggcagtgtcactcatgtcaccagcttcagccatgccccccccagtagccgaggaggctgcagcatcaagatggaaccagagccagcagagcctctcgctgcagcagtggaagcggccaatggggctgagcgagcccgagtgaacaaagcaccagaagggcggcgtctgagcgctgaggagctgatgactattgaggatgaaggagtcttggacaagatgctggatcagagcacggactttgaagagcggaagctcatccgggctgacttcgtgagctccgacaaaggaagagagaccagcgggacaaggagcgggaacggcggctgcaggaggcacggggccggccaggggaggggcgcggcaacacagccactgagaccaccacgaggcacagcagcgggcagcgatggctctgctgtcagcactgttaccaagactgagcggctcgtccactccaatgatggcacacggacggcccgcaccaccacagtggagtcgagtttcgtgaggcgctcggagaatggcagtggcagcaccatgatgcaaaccaagaccttctcctcttcctcctcatccaagaagatgggcagcatcttcgaccgcgaggaccagcgagccacgggccgccatggccggctcgagagtgagaaacggcaggccgagaagaagaaagagctgatgaaggcgcagagtctgcccaagacctcagcctcccaggcgcgcaaggccatgattgagaagctggagaaggagggcgcggccggcagccctgcggaccccgcgcagccgtgcagcgatccaccagcttcggggtccccaacgccaacagcatcaagcagatcgtcgtggactggtgtcgagccaagactcggggcctacgagcacgtcgacatccagaacttctcctccagctggagtgatgggatggccttctgtgccctggtgcacaacttcttccctgaggccttcgactatgggcagcttagccctcagaaccgacgccagaacttcgaggtggccttctcatctgcggagatgctggtggactatgtgcccctggtggaggtggacgacatgatgatcatgggcaagaagcctgaccccaagtgtgtcttcacctatgtgcagtcgctctacaaccacctgcgacgccacgaactggcctcgcgcggcaagaatgtctagcctgcccgcccgcatggccagccagtggcaactgccgcccccactctccgggcaccgtctcctgcctgtgcgtccgcccaccgctgccctgtctgttgcgacaccctcccccccacatacacacgcagcgttttgataaattattggttttcaacgaaaaaaaaaaaaaaaaaaaaaaaaaaaaaaaaaaaa

SEQ ID NO: 330 - DNA, 4553 bp, Homo sapiens
ggcggcatggaggcggcgcatctgctcccggccgccgacgtgctgcgccacttctcggtgacagccgagggcggcctgagcccggcgcaggtgaccggcgcgcgggagcgctacggccccaacgagctcccgagtgaggaagggaagtccctgtgggagctggtgctggaacagtttgaggacctcctggtgcgcatcctgctgctggctgcccttgtctcctttgtcctggcctggttcgaggagggcgaggagaccacgaccgccttcgtggagcccctggtcatcatgctgatcctcgtggccaacgccattgtgggcgtgtggcaggaacgcaacgccgagagtgccatcgaggccctgaaggagtatgagcctgagatgggcaaggtgatccgctcggaccgcaagggcgtgcagaggatccgtgcccgggacatcgtcccaggggacattgtagaagtggcagtgggggacaaagtgcctgctgacctccgcctcatcgagatcaagtccaccacgctgcgagtggaccagtccatcctgacgggtgaatctgtgtccgtgaccaagcacacagaggccatcccagaccccagagctgtgaaccaggacaagaagaacatgctgttttctggcaccaatatcacatcgggcaaagcggtgggtgtggccgtggccaccggcctgcacacggagctgggcaagatccggagccagatggcggcagtcgagcccgagcggacgccgctgcagcgcaagctggacgagtttggacggcagctgtcccacgccatctctgtgatctgcgtggccgtgtgggtcatcaacatcggccacttcgccgacccggcccacggtggctcctggctgcgtggcgctgtctactacttcaagatcgccgtggccctggcggtggcggccatccccgagggcctcccggctgtcatcactacatgcctggcactgggcacgcggcgcatggcacgcaagaacgccatcgtgcgaagcctgccgtccgtggagaccctgggctgcacctcagtcatctgctccgacaagacgggcacgctcaccaccaatcagatgtctgtctgccggatgttcgtggtagccgaggccgatgcgggctcctgccttttgcacgagttcaccatctcgggtaccacgtatacccccgagggcgaagtgcggcagggggatcagcctgtgcgctgcggccagttcgacgggctggtggagctggcgaccatctgcgccctgtgcaacgactcggcgctggactacaacgaggccaagggtgtgtacgagaaggtgggagaggccacggagacagctctgacttgcctggtggagaagatgaatgtgttcgacaccgacctgcaggctctgtcccgggtggagcgagctggcgcctgtaacacggtcatcaagcagctgatgcggaaggagttcaccctggagttctcccgagaccggaaatccatgtccgtgtactgcacgcccacccgccctcaccctaccggccagggcagcaagatgtttgtgaagggggctcctgagagtgtgatcgagcgctgtagctcagtccgcgtggggagccgcacagcacccctgacccccacctccagggagcagatcctggcaaagatccgggattggggctcaggctcagacacgctgcgctgcctggcactggccacccgggacgcgcccccaaggaaggaggacatggagctggacgactgcagcaagtttgtgcagtacgagacggacctgaccttcgtgggctgcgtaggcatgctggacccgccgcgacctgaggtggctgcctgcatcacacgctgctaccaggcgggcatccgcgtggtcatgatcacgggggataacaaaggcactgccgtggccatctgccgcaggcttggcatctttggggacacggaagacgtggcgggcaaggcctacacgggccgcgagtttgatgacctcagccccgagcagcagcgccaggcctgccgcaccgcccgctgcttcgcccgcgtggagcccgcacacaagtcccgcatcgtggagaacctgcagtcctttaacgagatcactgctatgactggcgatggagtgaacgacgcaccagccctgaagaaagcagagatcggcatcgccatgggctcaggcacggccgtggccaagtcggcggcagagatggtgctgtcagatgacaactttgcctccatcgtggctgcggtggaggagggccgggccatctacagcaacatgaagcaattcatccgctacctcatctcctccaatgttggcgaggtcgtctgcatcttcctcacggcaattctgggcctgcccgaagccctgatccctgtgcagctgctctgggtgaacctggtgacagatggcctacctgccacggctctgggcttcaacccgccagacctggacatcatagagaagctgccccggagcccccgagaagccctcatcagtggctggctcttcttccgatacctggctatcggagtgtacgtaggcctggccacagtggctgccgccacctggtggtttgtgtatgacgccgagggacctcacatcaacttctaccagctgaggaacttcctgaagtgctccgaagacaacccgctctttgccggcatcgactgtgaggtgttcgagtcacgcttccccaccaccatggccttgtccgtgctcgtgaccattgaaatgtgcaatgccctcaacagcgtctcggagaaccagtcgctgctgcggatgccgccctggatgaacccctggctgctggtggctgtggccatgtccatggccctgcacttcctcatcctgctcgtgccgcccctgcctctcattttccaggtgaccccactgagcgggcgccagtgggtggtggtgctccagatatctctgcctgtcatcctgctggatgaggccctcaagtacctgtcccggaaccacatgcacgaagaaatgagccagaagtgagcgctgggaacagggtggagtctccggtgtgtacctcagactgatggtgcccatgtgttcgcctccgccccccacccttgccaccacactcgcccacttgcccaccgggtcccgccggataaatgacaggcccgaggtcagaatggccatccccgggccccgtcctggggtctctgtccccacttccttctggcctgggaggtctgtaattcctgtctcctggactctcctgggaagttccctgctctgcagctctggcccaggagctgcaggctgggagggggcagccaagaagccggagctggcagcatacccagagatccggggcccccccacccccaaatcacgagtgcagctggagcttgctcccccttgttcggaagctggacgttcacttggtgactggtgcctctgcactgacggaggactctgggggtccttcttaccggctctgacctctctcttcgtgcctggtctgggactgggtcagccctgggggatcagaaggggccatctgggcccagctgtgtacagcgagggtgggcagccccctccactccactctgcttccacaaagtcggctcccgagagctcgaggctgcttctgtttatatgtgcagggcccgggccggtgaagggtcagagagacggacacaaggagccggcaggagggcggagcgaggatgtcctttcccgggagacaagtcgggaaagcctggctggactgcctcagccccgcgcgcctcctggactcagggttccccgtcctgagctcgggagatgttcagagtcacactgccgcccggtctgccacgcagaggtccaacttgccacccgcgtccctggtacctgagaccaccgacatcctcaggttcctgaccgtggcgcccttctacccagcccagtgtgcggccgccgcgctgtctgcacagctgggggcctctgagcctggtgggcttcctggactcttggcctcactccttgccccctccccacgacacccatgagccgaaaggatgtcactaaggatggctgattccccaagggcacccgctctccctccctccctgctggaggaacacgtcatatcagatgagaggaagatggcctctgatggacagaatttttctcttaactcagcttttgctactttggcaaaaactagcgaggggtagcagaaacctgcaccaaggattgtccctatgtcttggcccctcctagagcgtgtgcagactgatgattttatatgtaaatcaagactcacatccctttcctagtcccccacatccaaagcccctcagcctgccttgcagaccaatgggctccatgttctgtagccccctcccctacgcctcacccctcctccctctcacaggttctgggcggccagtgagagaaacgcagtgggggaggcagggagtctggtgcctgcagagattctctgcttctttcctggggggaggtggggaggtcttagcaggagcgggccctgtacccacctgctgacctgctgtttggtagagaaataaaggttgtgtgactggggg

SEQ ID NO: 331 - DNA, 6372 bp, Homo sapiens
ctgcagtgttcgcttttgctagaaagaggatgtggaggaaggaggaggtgggcaatctggcttgagttgtgctgtatcctcttccttgttagcttgccttagtctcactggagaccatttgcggatagtgcttggtccatgcccagcaggacagggctttgctgcttctgaaagtctggtgttctgtatctggggctgtgggttcctgtgtctagctgctcaggaaatcttgagaagcattccactctggggtgtaaaccagtatgagtttgaaattcaagcgtttgtacctgagttggggagagaattgcaaggcatactttctctgaaagtaacagaaccattcaggctgccatgttattaaggaatctgaactgttgatagcagttaccttgtgggtgatacaatgggaggcggcaaaaaaactacctgcataggagaccctgccctttgtcaagagctgggagcacatttcatcagagtagcaggcccacctggtgccagagggcctgcccctcctgcttctgttcctttgccttgcagtctcctggagagagcctctcttttcctgtacagcctttgggccaaaatgcccttctagcttctccaaagaagatccgagtttatttcattctatgttttaagaggtaaaaggacataacaagtgaaagaagttttgggctaaagtaggctatgtctccttatgtattactcaatactgttttgcagagaaaacatttttcaagcatgtgcttcctgaagacacctcagtctttgggccatttgatttccaatacatagggtggaagaatgtgattttggggctgaccataaactggaaatttgtgaaatggcagtgattgggcaatcttcagtttattttttcagttgaagtggaactcatttctggaatggatttaataggctgtgtctaatgtacaaactgggtgagtcctgccttagtgtgtcctgccccaccggtacgcttccaggatactcttttcccctctgtaaagtcactttcttctgatggccagtgtcactatgatgtcagtgaggtctggggatgaggacagtgtgtcctgaaattcacaggactgacgcctcaccccagtgcacgaggattcctgtggcatcaggtgctgctgtacctggtgtaggagcctaatcattgaaccattgtgttactcacattccatgtcacagaacatatcagcctcaagaaggatttggtggaggtggatttaccactggttttacaaaggaccgtgtaaagtcattgaagttgtgaaagtctattttttttcctgtaaatctattttttacagaatataagaaacatcaatgacctgatctgtccttcctcctccttcccgcttcccccaaaatcacattccagtttttattgtctttgtgtccaaagtaaactaggtgacttatttgtataaaatgttattttgccacatgagacagtaataaaagaaagattttcacagtacgtctccctcgtcctgtctcctgattgttgggcccgttgtgttgctgaggggagcaggggcgaatgggggctccaggtttctcttactttggctattatgtggcccttctgtaagtagttgaactagagtatagctggcttctagagtgattgaggaattgtactggactttaggcttaatatttttgctttatattttcccagggtgagtggctttgtaaattgaaagtttacatgcatgttttaaaggtagggtttttttttttgagatggagtttcgctcttttttcccaggctgggatgtgatggcatgatggtggctcactgcacccttcgcctcccgggttcaagtgattgtcctgcctcagcctcccaagtagctgggattacaagtgcatgccaccacgcccggctaattctgtatttttggtagagacagggtttccccatgttggccaggctggtcttgaactcctgacctcaggtgatcaacccgccttggcctcccaaagttctgggattacaggtgtgagccactgtggctggccataaaggtaggcttattaagaaatactttaactacagtaaaatttacctcaattaagagtattgatgcattttgacaaatgaatacttttattacccatcacaatcatgatataggacatttccatcgtacccactcagaaagttcctgagttccttgtgtttgcagccaggtgacttcccccacttcgcctcttgcaaccactatctgattctgtctctattggaaaacttggatacttttaaaatgaaatttgaacgttcatatttacagtcacaaattctcaagagtctggtttagatgctctgtggcacctgaagcaattattggcctttgctcacaaacacaactcacttatttctcccttttctcctgcttcttcatcgtttcttccacccagggctggttcccaggtgggatgactgaaaggtgaggaagcccttagagcatttgccaatgggagccattcatttgactttaaagtactgagaatttagaggcgttcttttaaatgcattatttaaaaagaaaggtaacacattaaggactttgctgcatcttttgattggctttcttctaggaagtagtgaccgaggtttccactttcctccaagaggaagagacagaagttttggcaaataggtcaatgctgggaacagatgcctgcctggctgagtgctgggaaagaaaggcagttggagggatgtgtgggtgcctgggagggcgtgggtggtgcccaggaggctatgggaatcagaatcacacttgcacaagagaagacccttatgggacaagtaaaatcagcatagtttcttgggcggggcaaaggtgtcctgatgaggatgctaggggtcaaatatgtggctgggttctgccccaatcgggaatgagacacagtactgaagtggaacgggggtagcatctccacccaccttcacagcctctggggaaaagaaagctttccttgcagcccaactccaggggcctaaatattgagcgccaacacaagacaggtccttgagcttctcggagcgagtcggggaagcagataatttcagatgcaaagtgccttgaataaacagaacgaaagatagagagccagagggggagaaacggcttggtgtggtcagggcaggcatccatgagacctaaacgaagagggggcattccagacaaaaggaacagtgatcacagaggccccgagtcaggaaccagctaagggtcttagagaagagctgcctcgtaaagctaagcaacaataaccagggaatggtgggcatgggccctgatagacaaggcaggtcttggctttttaagccatagaattggattttaggagggatgggcccgccgacaaagccaacaaagttttaacccgaagatcgctatcttatttatgctttaaaaagacctctctggcctttctgcgaagctctatccttagctttctcttgttagcattttgattaacgaatgtgggcacgaacagccagctgaccgaccgcgcgcgcagtcgagcgtcggttcatcgccttgggagggaccactggaggccccgccccctggccgcgagcgcacctcggccccgctcccgaggccctacgggcgtggcctctgtcccgggtcccgccccccagcactccggaacagcgcgctcgcagcgggaggtcgcgaagcctgggactgtgtctgtcgcccatggccgccgcgctgctcgcccgggcctcgggccctgcccgcagaggtgagtgcgctggggatccgtacggcggggcttcagcccgcgtctggcccagcgggcggaggtcctggcggccggctctgtcagagccgctggcaggcggagccccactccgggagcgctcacggcctttgccccagttctgctgctccttgcgccgacccagcccggcccttcaggcgtccctggttcctgcacagacccctaccccccgattgaccccagccaccagcccagttcccagttcccatatctccctcccttcatttcacccccactagaggttcagggtgcgtccttcttccggagccaggcctgggattgaaccagacccgcatctgtgaccttgggcaagacagcccctcctcagcctcggttggcccatgtgtaaaatgtccacagagaaaatcagagttgttgggaggattaaatcatagggtatgtaaagcacttcgtgcctggcgtgtaacaggtgttccacaaatgctcgttcttgctggttaatacagtacctttcccatcttacgtgtctccagttgtagcagccgtgacacatatagccacggcttcctttgcctggcctgaattacaaggggaacgctactgagaactgtgttaagcgctagttagtctttctttcgcactccgaggagcggaatactattcgcctccacttgttatagaaacggaggctcactgacgtttaaaacccttgcctaaggtcacagagctgaggtcttattactgttggtattatactgaggactgaaggatgtagtgtatggaaatgtctagtgagtgtactaagcattcagttagtatggggttttcagtggccgccatggacattttgggctgacagttctttgttgtgggggctgtcctctgccttgttggatgttcagcagggatcccggacccctatccactgggtaccaatagtattcccctgctctagttgtgacaactagaactggctccagacattgccagatgtcccttggagggcaaaatcctccctggtgagttagtgggtcactaggattcttggagacctcctgcctcctccttccactcacttctgcccttgccggcagctctctgtcctagggcctggcggcagttacacaccatctaccagtctgtggaactgcccgagacacaccagatgttgctccagacatgccgggactttgccgagaaggagttgtttcccattgcagcccaggtggataaggaacatctcttcccagcggctcaggtgagagtgcaacctcagcagcccacgatagtggtctgccctctgctactggatgaatggtggcagtgacagtcagcggcactcggactttggtagaggaaccccaaagcagggcctggaacccagaaaatgctctggaagtttcccttgtccagcctgtggccagtagccaggacttaacttctgggacaacagtaatatgtggtggatggtcagttgcttactgtgccagccactgtgctcattctaaatagtgcctttagggtgtttggcatgcactaggcactgttcttgagatgggttatctcatctgttcctcacaacggtcctgtgaggtgaaggtactattcttatttatttttttgagacggagtttcactcttgtggctcaggctggagtgcaatggtgcgacctcgcctcactgcagcctctgcctcctgagttcaagtgattctcctgcctcagcctcccaagtagctgggattataggcgtgcactgctctgccccgctacttttgtatttttagtaaagacggcgtttcaccatgttggccaggctggtctcaaactcctgaattcaggtgatctgcccacctcggcctcccaaagtgctgggattacaggtgtgagacaccacgcccggccaaaggtagtattattatataccccatggactcagacttgtgaacaagttaaataacatacccaaggtcatggagctcatcagcggcagcctgctcgacctattttcttttttatttacttatttttttttgaaatggactctcgctctgttgcccaggctggagggcagtggcgcaatctcaacgcactgcacccctctgcctcctgggttcaagcaattctcctgcctcggcccccagtagctgggattacaggcgggcaccaccacgcccagctagtttttgtactttcagtagagatggggtttctccatgttgggcaggctggtctcaaactcctgaccttaggcgatctgcccgccttggcgtcccaaagtgctgggattacaggcgtgagccaccgtgcccggcctgcttgaactgttttctcccctgagtttcccatcagcgcgctccctcccgtgccactgtgttcttccatttgcattcagtctgtctgcagctacgcgttgaagatgttactgccgtacacgctgacctaaagatgtccagcacctggtgtaaacactcagtagtagatagttgtttaattaatgatttgtgaaaagtcaaacctctccggcctcttctccttgcctgtttttttttttaattttaattttaatttattttttattttt

SEQ ID NO: 332 - DNA, 89328 bp, Homo sapiens
gacccaagggcttggtcactggactgtgggcaatgacactcaaaagcaaaggaactgtgggactaccagtagggtgagctgggccctgtgatggccacaagcttagagaagttattagagttaacgagatgatccataagtgggggatgctctttcattatagctattgaggagtttgtgtactgcttagaacagtgtctggcacctaatagacacagtttaagtgttagcgttttcgttgttggtgtcattgtcatcatcatcatcaatgagaatattataaaactatcaaaagacatttaaaaagacttaagtggtaagatacaccattgtattataggaaacctcaataacaaagacatcaatacctcccaaattgacctgtggattcaatgccattcataataaaattgcagcagggtttttgctagaaattcacacagattttctaagttatatgagaaactcctaggttttctcttactctctgaactgtcatccctttaaggcttttttgtttttttgagatagggtctcactgtgtcacctaggctggagtgcagtggtgccatcacagcgccaccatgccccgctaattaaaaattttttttttttttggtagagattagctctcactatgtttcccaggctggtcttgaactcctgggctcaagtgatcctcctgcctcagcctcccatagtattgcgattacaggtgtgagccactgttcctggaaccctttaaggtttttttacatgaatcctcttctgactccccagttcttaagatccttctctatgccctcagcaaaattccctgtatcctgaacttctgtaaacatccattcatcttcttgatctaaatgaaatatggctctgaggacatgcctttcccagggttcttgaaagtgggaggctgttttctctcctgcactcagtacaatgcttggctcaaaggtgtggtagttctccttgattgtcattgctgctttcagacctttttcctccatagaccactccaacttttaatctcatgacatcagagtatcccttgtttaatcacttttgtggttaaaagagacctttgggtcagtctgcctcattccttgaagagtttagccctggctcacttttcactctatttcttctcctgtcttaaatcttcgttatttcattgtttatatagattttcctttcattatcctgacctcgaatttctttgactttctctcccttagtgagcttgacctccatcccatctcagacacacattgccataccttacttagactttatccataactgtagctgccttcccccacaatctcgagtcccaatccctgttttatcttctctttagggcccttgcttcatcaagtctttaacctcaccaggacctacagtcttttgaccctatttcctatttactaccccttttgtttttcattccccttcttaatgttcacattcccatcttgatctggcttagatccatggatgagtaataagagcattttttaatgtacatcctcaactccactgcctcctctctaaactttgttatgtttgcctggtaaaactccagctctggtcaaatccaacttgttacctttgcgacagtacccaaatagctgaacaaggctagagaaaaacatacagccgtgcagactgctctcactttaacttgctgatcactaactaacgtggcccttaatgctacctgtcagtcccgctgtttgccctggtcccttgactctcctgctccccgagtcaggtatttcatgctccaccctcttcaaacctccatcccatctccctcatcctcactctcagctctctgaaaataggagcaactagaagataatttccaggaactctcatcaccctctctgcccacctacttgtatctgtgcccgtagcctgcctttgcttctggtctgtggattagcgatcttgctctgaatatgagctccccttaagtttgcactaaattccattgccttttgcacacattgctccagcagtcttcttctctccccccttaaaaatcatcagttttaccctttctattggattgcactcatcagtttatagatctgctgtaatttttccatactaagaaaaatctctccctccatttccctgagtgataatccttcccggatctcagaactcagtcctcagacctcttctcttttctgcctatatttactttcagagtattctcactcaatcttgtggctttaataacttccgtttgctggtgactaacatttttctttagctggacttctttgtttttttttttgagacagggtctcgctctgtcacccaggctggagtgcaggggcacgatctgcagccctgacctcccaggcataagcagttcttccaccccagcctcccttgtagctgagactacaggcatccaccaccacacccggctattttttaaattttttttgtagagacagggtcttaccatgttgcccagtctggtcttgaactcctggcctcaggtgatccacccaccttggcctcccaaagtgctgggattacaggcatgagccactgcacctggcttagctagatttttctcctgaatgctagacttgtttattcacctgactacttcacattctacttgtatttctactgatcctctcatccaccagatatcctcagagtactcttgtttctgtaaacaataaatacatctttcaatttatggctcaggctaaagttttgatgtcatccttcactccccttttttagacaccctcataagaatccatcatcaagtcctattggctctatctttaaaatatccagaatttgatttctgtttaccgtatctgctgctttccctctgctccaaaaacagccccctaactggtctcctgctgtcgtctctttctccctttaagattgattctttacaaagcagccaaagagatccttttaacatgtaagtcagatgatgtcacccctctgctcagaaccttccatgggccgggcacggtggctcacgcctgtcatcccagcactttgggaggccaaggcaggtggatcacctgaggccaggagtttgagaccagcctggccaacatggtgaaaccccatctctactaaaaatacaaaaatttgttgggcatggtggcacatgcctgaaattctacctacttgggaggctgaggcatgagaattgcttgaacttgggaggcgggggttgcagtgagctgagatcctgcctctgcactccagcctgggcaacagagcaaaactctgtctcaaaaacaaaacgaaaaaaagaaccttccatggcttcacatcaggataaaagccagcgtccttccgtggcctactgtgcctgtccagggtggctctgtcttgtctctctgagtcgcacttctcttttctcactggggttcattgaagccagccctgacttccctgtgacgtgctctgtatgcctttgcctctagtccaagctcttctcccagcaagatgcatagttggctccctcaccttctttggatctgtgcttaaatactacttttaaaataaggtttaaataatatcttatgtacaaaatctttctctaagcatgtaaagacattctccttatattttcttccaaagccttgcaattttgtcttccatgtaattcctaaatccacctggagttactttttgggtagtgtaagtaaggatccaattcagtttttttctttttagattaacagttgttacagcacctcttcgagcacagtccatcttccccaggtctttaatgctattgatagatgccatttaccaagttaccatgtatacacagttctgctcttgggctgtcttttccagtggttgactttctgcctctgtgctaatttcaccttttcttagcttctctttcattttcttctcttttcatgttttcttagagacaaggtctcgctgtgtcacccaggcctgagtgcagtgttgtgatcatagctcaccatagccttgaactcctgggttcaagcagtccttctgcatcaggctcccaagtagctgggactacgaggcacagaccatcaagcccagctaattaaaacaagtttttttgttttttttttttttgtagagatagggtcttgctatgttaggcaggtcttgaactctcctggcttctgcctctcaaagcactggaattataggcatatgaaccactgcgcctggccgccttagttcctttcatttagcacagtgcgtttgttctgatgaaagatgaattttcaatgtgatgaggacagtgggaaagaggaagtgtgtggtttttggggagtggggagaggactggtatgtttggagccctttaaagcaggggttgccagaccatggccagatctggcctactacctgttttttttatgacccatgagttaagaatggttttttacgtttctaaatggttggggagatgataaagtttcatgacacatgaaaattatatgaatttaaattttagtttccacaaacagtttcattagagcccagccatgttcacttgtttaggtgtttcctgtggctgcgtttgtgcactgggggagttgagagtgtgacagaggctgtttggccatcagagctggaaatattcactctctgaccctttacagaaaaagtttgtgaccctgcaaaatggattggtctgggttgtcaggacggcttcggaatcctggatgtgacagaagaggagagaagagtgtgaaaagaagttttgagttctgcgcagatttcaaaattttaccctaggctgtttgtggcaggagatacagatgtttttattttctgtttttgttcaatcctgcccagtcaaatcagcaagattatggttttagataacaaccagtgattgttgttttaatctgtgaacttgtgtggattttaatagtttttctcactggcagttgttaaactactctaaaccacatatgccagtttttaagtaaatctaaggtattagaataaatcttttaacaagtatgaaggtcttagttgtagcattacaatgactagcatgtagcttttttttttttttcagtaggaggtcccacctgatgattgaactgtaaaatgtgtgtgcatacagtatattagacctatctaacctgttacatataatcacaggtagttttctttaattttactcaaacagaacttgccaagattaaaccctacagatctgttcaaacttgagggaaatgaaattctaccttttgtataattcaaaggatttttttggttctgtaatgtaacatttcatttatacattgtcttcagggtatgcattcctttgtaataggaatgtctaacggttgaattttaattgtccttgtaagtactttccgccttctgtgaatgaagtagctaagctttttaaagtcgctgtacattttttgttagtttggttaaagcagaaatgacagcagttattattaataacttttgtaatattggagtgattgatctttactatttcattgtcgttaatcattacacatatttagctgcattgtcttgacagtgaacgtagattttgcagacaagagtatactaggactattctggatctgtaatgccaaatagttttctttcaaggctgtagagaaggtaaagatgtatagaagagttaaatgctttcatagtatttactgttactgaataaaagcttctttgtcctcatctgatgaaagttgttgacatattatattgtataaaaatatggtgaatagaagctatagatatttattatatgactctagaggaagagttttactgacaccatttataaaaggaaacacatctaaaacatgttctttgctcttaagaaatttaaaatacagttaattgggttataactcctcccagaccctcaagcttatccactgtatcatttaatgggaaaggagaaattcgatgtttgcttaacagcagtcataaaatatctatatgatattcacatcttaaaatctgacacgtttttaagtttctgagtagagattatatggatttcttaatgggaaagggagggttgagctgatgcctcactttcccctttctgttgctgactcaaagggtactgatttcactgcctatgtcaggcttgattcctggctctgagcacaagctctgtaagtgcttggattacatagcaaggctgtgatgcagtcaggggccacttttgagtgtgcaaacagtctcatcactgtttaaaacttgaacaaattcaattaatgggtgccaattctgggccctagagatacagaaaagaataagatagtctccatttttcaaggacttaacagtctagccggggagataggttatataaatcttatctgatgtggacaagttattccagtcttatgaacagatctccagggcttcatagagggagtctgtttgtctggaaaagtggaggagtttctccaggtctgagtttcccaaaggtttgaaaggagatgcaggccaggcgcagtggctcacgcatgtaatcccaacactctgggaggccgaggcgggcagatcacgaggtcaggagaccgagaccagcctgaccaaaatggtgaaaccctgtctctactaaaatacaaaaaaattagccgggcgtggtggcatgcacctgtagtcccagctactcaggaggctgaggcagaagaatcacttgaacccaggaggtggaggttgcagtgagctgagatcacgctactgcactccagcctgggcaacagagcaagactccatctcaaaaaaaaaaaaaaaaaggagatgtaagtttctcccaggcagaggattgggagatttggagaggactttcttctggtggtgagatatgtttgagcaaagacagaagattggcgaaatcgggggttttcaggaatccatggtttacaacctggggagagcatatgacagtgatcacagctccacattattttttctttatactgcaaacgcgaattattgtgtgccaaatagatgctgtcatgattactctttagtcgctattaatagttatttggatttcaggaatgttttggttggccttagctcagttaaatgcttttcatttggttaaaattattataagggcatggtgcatatataacaaattaccatgtagcattgggaattattcacaacatagttcatgaacttagtatttattctatggtcgggaaatcatttttcccattttctttaagaatattgcttttcttctgtcttgtttagtctgtaccatagtttgattccaaagcttttgctgtgctagataccaattttgagtaaaacagatgttacgattgcaaggaatgacttcagggaagaccattcacgggggaaaggtggttcccatataagaggcagacggcaaaggatcaggtgaaagaaataattctcgctgctttcttacagctgtaaatacacattcttagtcatctcagtaggaaaagagaggcgttattgaagcttattcaagttgcagagctctacttttacttgactatagcattaaataataaatggcttcaaaacttcatgcagatggggcaaatagaggtgattagttttgttctttgtcctagaaattgtgatcagccttagcattcttcatagtgttttaaactcctggttattttcttagctgatgagtgtctacaatatatttggtactccttaaagctaccttaagaatgttagtgaatcggccaggtgcagtggctcacacctgtaatcccagcactttgggaggccgaggtaggcagatcacgagatcgggagttcgagaccagcctggctaatggtgaaaccctgtctctactaaaaatacaaaaattagccgggcgtggtggcgtgtgcctgtagtcccagctactcgggaggctgaggcagaagaattgcttgaacccaggaggcagaggttgcagtgagccaagattgcaccactgcaactccagcctgggcgacagagcaaaactccgtctcaaaaaaaagagtgttagtgagtattcttccattcttcttacggcaatgctgtcactaaaaaatggcttatgtacttgtttcatacagtttattgaggcaagattagtgctgtacccttgaattttcatttcttaatttggtcactcagttgccgagacactgagtcaaagtttcattatttacactcagggctgactgggggagacatagacaaattattttatgtgcagtttcccagtttttaattaatttatactctgcctctttcaaaaccaagtttgagataccttaaaaaataaatacgagaaaaagataaggggggaaattaggggtagtggaaaagccagatagaaaaagtaaggattcatgttgtttgggtcataaatttgactccagacttaagaaaggccccgacagagagaaaacataataaataatgtgagttctattgtctgttcgtaagataaaaacacacatcacttggtgtataagaagccatggtactgaagttcaaggaaagacgtgtttcctctgcccccggaaaaggggcttccataggtgtcttctgcggcaactgagcagctctgtaacctgggcagctcagtgtccagagttctgaatgaacatgtggctccctgctggtctggctcaatccaagggtgaaaggtagggcactgtgaatctacagcgagagcagaaggagaaaattcatatggtctgaatcatttggcatttatagaatctcttaaattgtccaatgtggcaactttccttctaacgttaaaagagatttgctgtttctttaggggatttatggaatgaggaagttggcttgcatttaggtgcaatgttgcacaaaaaattcttatctttagagctctggaatgatagccagtgcaggcagtactcctggcatgagaggcacgcagagactgagatgcccagagggtacaaccacaggttcatctttctccctgggcatacattcttggtggaagaacaggcacactttacattctccccctctcctttctctcccatctatgtagttgactgtagaagtttggtgtgtgtgttgtcagcctcactgtgtctacagagtagatagtatccttgtcctacaggaatattgtttcttataactgaacttagctacatattgggtgacagaggaccagaatatattctctgtctagaacattaaataaagatactctgttctgattcagggtagatccataagcatgagcagtcactggaactgggatttgggttgtcatgggtagtggaagtgctcaggccagagtgcttcacttggccttgtgtctctgccagttactggctgagtgatttgtgcaagttacttaccatctctacttcacttaccttatctgtaaatggagaggacagtgttggcctcataaggctgttgcagagactgagataatacatgagaagtgacaagaacagtgtctggtgcatagtaagtgctcaatatgtgtagatcttttatttggtgttgtaaattaaggagctaaagcagataaacgtagcgtacctccccacaatagtagataaaagcagttttctgaataggacatttggaaatcataatcttttttttctgattcgtgataattttatcctttttcagagaaacagcacccaggactatcttccaaagagttctggatatcctaaagaaatcttctcatgctgttgagcttgcctgcagagatccatcccaagtggaaaacctggcttccagtctgcagttaataacagaatgcttcaggtgtcttcgcaatgcttgcatagagtgttctgtgaaccagaattcaatcaggtagttacacacgtaccttggattctgtttctttgtatatgtgcatgctggttctgtcatttggtttatctgttagaagttgttttgggctgggtaaggtggctcatgcctgtaatcccagcattttgggaggctgaggcaggaggattgcttgagtccaggagttcaagaccggcctgggcaacatggtgagaccctgtctctacaaaaaaaatacaaaaaattagctggacatggtggcgcacacctgtagtcccaactgctcaggagactgaggtgggaggattgcttgggccagggagaggcagaggttgcagtaatctgagatgatgccattgctgcaggctgggccacattgtgagaccctgtctcagggaaaaaaaaaaaaaaaaagttgttctggcatgatagtatcacccactgttattgcaggattgccctttacatctgctgggagaggccctctacaggccttgccattggagtctctctgactagtgtataaaataatggagtgtgtttaacattaggggttagatttcttgtttgtttttatcacatgttttgaggtatttggttcttcatagtgttttgaagctgattttgagtctttgttcctagattttacctgcctaagtttatatgcagttcttgacctcaggttgtaaatgttttaattacttttaatgttttaatttgttactcttgtgtttggacaagaagcatattttgtaaatttacaagatgacctgtctttcctaaagatcatgtaaagttccaagctctgcttccacctattttatgatgcgcacatttttaaaagtagttaaaacatgagcaggcgagctgtccagtgctcttctttgcttttacgtgttaccgtctcctcccagaacacagcatctttcttctttgattttgtggaacctgctttttattaaaaatttttacttgaagtcagaagccacaaacaggatgctcactttccttcctggacttggatgtagacagagcctccaggcttccctgtcaccactgtgacgggtaagcttgggctggtccagaagccacttgagggactcccttcggttagacacatatacccgaggctttgatatgattaatgagatttttaagatcaaaggagagagggtaaaaagtgagtcgtgtaacttcaatactaaaccaaacctgccatccatttgaggataaatggatagaaacaacaataatcttgataataatagtctacattctaaaacataactagttatatgctagaagcatctggccagaaggctagtttcttttgtccttttccagtcacaaggtgctctagtgtgatggggaaggaaaggagagccgtagaactaacttttgactgtggctggcagatacacctttgtgcttggctaatcttggtggggaagggagtgagcattcgttgagcctgccttcggcattgggctttgtcccaagggttttgcttgtagtatcttctttaattcttagaacaaactcaagaaattttttcatttttacaaaagatgaaactgtaacttggagaggttaaataacttgtctgagagtcacttgttaagtgagagaggctgggaacattctctccatatccagacatctgactctaaagcttaagcttaacaagcagtctgcccttactgttctgagcttaagctcaaaagcagtctgggccaggcgcggtggctcacgcctgtaatcccaacactttgggaggccgaggcgggtgaatcatgaggtcaggagttcgagaccagcctggccagcatggtgaaaccctgtctctactaaaaataaaaaattagctgggtgtggtggcacacacctgtagtcccagctactctggaggctgaggcaggagaatcacttgaacggggaaagcggaggttgcagtgagccaagattgggctactgcacttcagcctgggcaacagagtgagactccgtctcaaaaaaaaaaatgcagtctacccttgctgtcctgagccttacacactggtcttgttgtggatgactgctccatcttgaccctggacaggtgacttggtcttcctgagtatcagttttgtcctctgtaaaactaggtaagcaatgtcttccaaacaggctggttatggggtgtaaatgagattacttatgtaaatgcctaatgcacattgtgtgctcagtaaacattaaatgtttctgcctctgcctcaggaatgaatgtacaacacaagtttatgttaatactttctttcaaagcagtcaatttttattttcttttttgagtaatatatgcaaactataaaaattctaacattacaaaaataaatactatgacaagtaagttatcggtggtcttttggtagggccagcaaagcaagggctgtgctgtttgtgatatctttttattgcatgcaacttatggttgggcggaaatgaaaatgaacatttaagggtgttaatttttctgcctcttcccttctaggattgtattattattcactgttgatttttaaaggaaaatttcaaccatttagggcagcaattttcagaaaagaattttctagttagaaatactacaaagattctagtaaagactttgtggccaagcttaactaaggccagtatttctgagccagtcaagattcagattgcaactagtacatatttttctgatgttttactttaagtcgttaaagagttcatcaaaaggtgtgatgctattaaagcctagatctttttacatcttttgcactttgtgtggactgggactgtttttgccaagaatgcatggaatggggtaaaatacaataaagcaaagaatctgagtcatgggaaacttcaggaagtactcaaagaaagctgttggaagcagttagctctgcatgtaaatataacctctactgctagggttgctatatttttcctgtaaagagccagataataaataatttaggctttgtaatctctgtcagatttctcagctctcccattgtagtgcaaaaacagccatagacaatatatgaatgaatgaacatgtctaattttgtcttttttaaaaaacccaggaacttggatacgattggtgttgctgttgatttgattcttctgtttcgtgaactgcgagtggaacaggaatctctgttgacaggtagcatgcaatataattcatggattatttatatctttataaagggttcaaaaccagtactttgagtattaacatcattcattgaaacacatgttctgtatttcatgagatagggaaactttaatagtgaattattaaagaattataaagttgtatcaacttcccttcctgaatggctgaattttgttcctttcacatttgtatgttgaagtctgtctgttccagttgctataacaaaatgccttaggctgggtagtttataaacaacagaaatgtattgcttacagttctggaggctggaaagtccaagattaaggtaccagcagattgggtgttttgcgggggctgctctcgtcttcatagatggtgcctcttgctttgttctcctgtggtggaaggtggaaggcagaaggcataaacaagctctctgggccccttttataagggcactaatcccattcacgagggctgcaccatcatgacctagtcacttcccaaaggccccatcttatactagcaagttggggattagatttcagcataggaatttcggaggggcacagatattcagatcatagcatggtcctaacccccaatacccagaatgtgactgaatttggagataggatctttaaagaggtaattaaggtaaaatgagggtatatgactggtatccttataggaagaggaaattaggacatggccatgctcagagtagagaccatgtgaagacacagggagaagatgaccatctacaggccaaggagcgagacctcagaagaaatcagccctctcgacaccttgatcttggacctccagccaccagaactgtgtaaaaataaatgtctgttgtttaagccattcagtctgtggtaagacttttaatatttatgaatgtgacaggccctggtccaggttttgggtgtgattcaaacagtgaccaaaacagacaaaaagtgtctgtccttagagaactcacattccgttgaggggaaccacatgttaagtgtctaagtcaagtatctagtgtgatgaaaatggaacttagctctgattgttaacggttgttgacttgggattaagagaaacaccacacttctttagactcattagtagaatggttttggtctttgttcttctagcatcaacatctttcctttggacagtggttattatcttaacataatgtttaaaaaaaaaacgtagatttttaatttatgatctctttgtgccaggaattgaaatactttatgggtaaacctaaattatttgataaaaaaatcttaatgtaggctgggtgccgtggctcatgcctgtaattctagcacttggagaggccaaggtggacagattgcttgagctcaggtgtttgagaccagcctgggtaacatggtgaaaccccgtttccaaaaaaatacaaaggctgggtgcagtggctcaagcctgtaatcccagcactttgggaggctgaggcgggcggatcatttgaggtcaggagttcaagaccagcctggccaacatggtgaaaccccctctctactaaaaatacaaaaattagctgggtgtgatggcgcatgcttgtgatcccagctactcaggaggctgaggcaggagagttgattgaacctaggagatggaggttgtagtgagccgagatcgtgccattgcactccagcctgggtgacaagagtgaaattctgtctcgaaaaaaaaaagaaccgggcatggtggcacacgcctgtagtcgcagctacttggaggctgaggtaggaagattgcttgagcctgggaggtggaagttgcagtgagctgagatcacgccgctgcactccagcctgggtgacagagcaagactctgtctcaaaaaaaaaaaaaaaaaaaaaaaaaacaaaaccccagaaaattttaatgtaaatttccaggtggataagttagatgtactaaattataggttaaattttgttgttgttggctgggcgcagtggctcacgcctgtaatcccagcactttgggaggctgaagtgggcggatcacgaggtcaggagatctacctggctaacacggtgaaaccccgtctctagtaaaaatacaaaaaattagccgggcatggtggtgggcacctgtagtcccagctactggggaggctgaggcaggagaatggcatgcacccaggaggcagagcttgcagtgagccgagattgccgccactgaactccagcctgggcgacagagcgagactccacctcaaaaaaaaaaaaaaaaattgtcattgtaataacgtctttaccttataattcaatgaatataacctttaaatgagaagtctccagttgcatttaaaatattatttgacttacaaattgttttatatacagttttaatgcctgtactttgcatataacatgaggcatatttctttttttttttttgagatggagtcttactctgtcgcccaggctggagtgcagtggtgcgatattggctcgctgcaaccaccgccttcccgccgggttcaagcgattctcctgcctcagcctcccgagtagctgggattacaggcgcctgccgccgcactcggctgattttttgtatttttttattagagatggggtttcaccttggccaggcaggtcttgaactcctgacctcataatctacccacctcggcctctcaaagtgctgggattacaggcatgaaccaccgcacctggccacgtgaggcatatttctattgatgttaatatgtgtgcttctcttggtagatagacaagaactagaggtgatggtcttttttcacaggtgaaataggctaaattagcgtgttagagcactgcctggtttggtttaatttctgtgatttcctagtgttttcattttaaactcagtttgctagaaattcttggatcttgctatttgattttgaagtattcctttaggaaatggtaattaaaaattaattacttcctttaagaatttacagacaaagtgcatcaccatgtttttttgagcatcagtttttaaaataatctcaagaaattgaaaggatgtaggatttagttgtgaaatgtttttacgatattatatatttaaagatacttctgtagctctattttataataaaagggaagcatcagtactcaaaattggggaattataaattagcagtaaagtccgtgtttcacagtgtcacttggaagggcagctattttgaggtctctgtgtggtatagtaattgagaaagaaagttgagaatgtactgtgttttataattggtgatcctgatggggcgggcagtgtggcgctccagagctgctgtgctgtggtgggcggaaggaggtttctcttttaatgatatatgctaaataaagaagcaaaggggaagtgctgtacaaatgctgtgattaaataactattagaatggagccagcccctccaccatgtgctggatttcatcgccacttgcccacgcagaagcttttctcctgaaattatccccttgctctcaggcagcctctgtttttttcctctttactccatcattttcatcagcaagtaatatgccctcccatttttcatttaaaaatatcttcttttgactccatgtccccgtcagtccagtatctcgtttttctgctctatcccaaatgtgctacaaaagatgtatttagtttttacaatatatggtaaaagattatttcatccttcacaggattactttccactgaagcaggtagatgacctaagaaaaaatttaacggagcagatatctgaaactacttttatgaaccagtttgtcattgaggagtaaattggttatttggttgttagcttggctattcactcatattcactaggcagagagggcagattcttacagacctgttacatgttagctgtattaaatgttgttcttaatttaggtagttgcatttgtatgagtttaattgttttttattgatgtgagattcacatattgttaactattttaaagtgaacaatcgagtggcatttagtacatccacagtattatgcaactaccatctctacctaattaaaaaaaaaatttttttttttgagacggagtttgctctcgttgcccaggctggagtgcagtggcacaatctcggctcactacagtctccgcctcccaggttcaagcaattctcctgcctcagcctcttgagtagttgggattacaggcacccaccaccacgcctggctaatttttgtatttttagtagagatggagtttcaccacattggccaggctggtctcgaactcctgacttcaggtgaaccacccacctcggcctccgaaagtgctggaattacaggcgtgagccgctgcgtccggcctaaaaatcaccctaaaaggataccgttttcattgagcagctgctctctttccgcctccctgtagcccctggcaaccactacttagcattctgtctctgtagatctacctactctggatacttcatataaatggaatcatagaattaattatgtgacctttggtgtcttactcctttcacttagcataatgtttttatttatttatttatttttttgagacagagtctcgctgtcgcccaggctggagtgcagtggggcgatctcggctcactgcaggctccgccccctggggttcacgccattctcctgcctcagcctcccgcacagctgggactacaggcgcccgccaccacgcccagctaattttttgtatttttagtagagacggggtttcaccgtgttagccaggatggtctcgatctcctgaccttgtgatccgcccgcctcggcctcccaaagtgttgggattacaggcgtgagccaccgctcctggcctttagcataatgtttttaaggttcatccaccttgtagtgtgtatcattacttcgttcctctttatggtggaataatactccgttgttttgatatatcacattttgtttatccattcattgtttgttggacatttaggttgtttccaccttttgtctatcatgagtcatgctgttgtgaacatgctggtacatccaattgtttatctgtttttatttcttttgggtgtatacctaggaatagaattgctgggtcatatggtaactctgcttaccatttgaggagctgtcagacttttccatagcagctgaatcatatgacttttcaccgacaccatacgaatgttcccatttcttgcatccttgctgactctttctttctgtgttgtagtcatcctggtgggtgtgaagtgggggtacttcattgtggttttgatttgcatttcctaaatgatcacgtacttattggccgtttgtaaatcttctttggagaaatgtctatttgagtcctttgtccagttttcaattgggctgtttgtgtctatttcttgtagagttgtaaaggttttctatacattgtagatacttgggataatattgaatctatagatcaattggggaagaattgccatcttaacactattgagttttcaagttcatgaatatggaacatctctctatttattcaggacttatttaatttttcagttgtgttcctatttagtagatagcttgtgtttcgccacagatgttattggaaggatattattgaggcaggaaggaaaatggaaaggaagtaatatttctcatcaccttgaaaacggcagctagtgaaatgaccgaattttagttggaattcagcaatgaaatttggattcaacagtgaaacttagaaaaaattttatggtgtgttagttcaaacctaatacaaataatcttttaaaaagtattctggttcctaacaaagcgcctgtacttttttgactctttctctgtgagaactttattctaggtagattttttagcagggtatgtgtgccagttttttgttaccacacttgaggtaagaactgtaattacattgtcaaaataatatttagagtattattttcagggaataattgcagtggtatgacgaatatattatgcccatcaaattttatgtaaacacaagcatgagttattttaattgagttattggtgttgtttttggcctttattctttcttactctgtaaaaataatgttgggatttttgagggtcttcataacatttgcagtatttacataaagatcagttgataagctgtttggtaaagtaaactgtcatttgtacctgtctggagttttcttttcttgtgtctgggacatctttaagccttttccttttcagaattgtgttctgatcctgagcattaatcttatgtgcctgatgagttgttggatcagttggttttcagatcaacctatactgttggctttttgcatgttcagttttatacagatctgagtgttaatattctaaaatattcagtagaaatctttttttttttctttttctttcctttttttttttttttttttgagacagggtctgggtctgtctccccggctggatgcagtggcttaatcttggctcactggaacctccacctcctgggttcaagcaattctccctgcctcagcctcctaagtagctgggattacagacgccttccaccacgcctggctaatttttgtgttttcagtagtgacggggtttcatcacgttggccaggctggtctcgaactcctgacctcaggtgatccgcacccccctcgtcttcccagagtgctgggattacgggtgtgagccactgcacccaggcaataagttaattaattttgtatgtagagtatattgttttggtaaggcatattaatttttttttttttttttgagacagagtctcactctgtctcccaggctggagtgcagtggcgtgatcttggcccactgcaacctctgcctcccaggttcaagcaattctcatgccccagcctcccaagtaattttttttacttttagtagagatggggttttgacatattggccaggctggtcttgaactcctggcctcaagtgatccacccgccttggcctcccaaagtgctgggattacaggcgtgagccgccgctcccagccatggcatattcatgttattcccaaagtgaacttgtggagacagactttaatttttaaaagaagcaagcagaaactttctgtttaataacatggagaatatttcttaagatgcatttatttattgtgtttaatcatttatttatttatttataacttttatatattcttagcttttcgctgtggcctgcagtttttaggcaacattgcctcacggaatgaagattcccagtctattgtttgggtgcatgctttcccagaactgtttttgtgagtatattgataagcatttttctaacttgtgagaagattgtggctatatttttccattttatataaagttcgaaaacaggaaaaagtaacccactgtaatagagttcaggatagtagttgttcttggtgggtgggtaccagctgggagagggcactagggaaacacctgggtcctggaagtgttcgtctatatcttgaccttggtggtggttacatggatgtatacatatccaaactttgttcattgagctgtatgtacacttaagatttatgcccttgattgtatatcagtttacttttacaaaaataaagtcatggataaagtaagtaatattgttaaggacactgaaatttataagaaacacaattaaaatagagcatcaaagtatgggcaatgaattaaaattgtttatgtattgaatactgatatgctgagcacaatgctgtatgttttggaagataagaagaagatgtggataaacaatcagtttatccatgtaagaagtgagtaaccagtccatttatcagtgtaagatgtgggtaaccattccatttgtctcgattggatcctggtactttttctggtgattctacttcttaaaaaccagctctgttcataagaaattgagcattgaggtaaaaggtgagcagggaatagagtcagtatacctagtaggaaaggcacagtctgggagtgggagacctggctttgaatctaggctttggtgccaatgaatggggtgactttgatggttgcaacagtataagcagcacagcagggtagcagctgttgtgtacataccctgaactgggcattatccgtatattttttctgttctcacaatagcctgcagagtaagtgttactgtctccccatttggacagatgagagacctgaagctcatcactggtaaatggcagaggtagagtgtaaacccattgctgccatctggatctaaagcctatctatgctcattgtaaatactgtgctgcttaaattccgtaatgcccttccttgttgtacagctttcctgggctcctctgtgaagtatagcgttaagatgggataaactctaattcacctgtagctcatggaatttctcaaattcctgcaaataattaagagttgaaggtgtatatatattaatgttacatatattaatgatatttgagcttaggtggaagaagagaattacgaaattcaagctacagaaataggcattgcttatttttgagaattcattcccttaaaacgttttggatacctaatatctgccaggttttgggatagatgattagaatgtggtggtaacttatatattcgttattcctgaaggatttcattctttggttggggaagtaaaggaacaggcacataggttgtgatgtaagaactaaggtaattagggcaaatccagggtgtaatagaaaaacaagggagaggcttaagtgtaggtcagtcagagaagtcttaacagtttacatgttgcttttagatgatctcatttgatcgtcattaaaaaccctgtgaaatagaggttttgttattgtattttattttttataccagaaaacatattaagagaggttctttgccttcactttttatgcatttatgggacagatataaccaaatttgaattccagttttgtcaggtgctggctttgtgctattggccaagtgaagctaacaaattctttatctgaaatagatgaataatacctccttcagaagagtattatgaagtttaaatgaaaaaaaatcctgccatattgcataacccatgatataattgacaatcaatatgtcagtgaccttccccaggtcacctggctgatagctagaggagctaggagttatagcgaggctcctgactccaaattctatttcttgccccactataccatctctcctgtaggcatcttgtccctaaggactattaaagcagtgccagcagtcattgaggtatcattttgtacctgtcgattttttctttctaacaagaatgaacattttaatgttttataaatgtaatcattctaatctttttctctaatggtaagttatttgccttttgccttctgagttctatgtcaacttcaactttaatattttggatactttttattgtgactaagtttatatttactatttttacagtaaataatctacttattttaaagtgctataattctaaatcctcaaaagtattagcatgtagtgaatttgacaatggtattactgttatttttgtgttttatcatgttactaaattgggctaacaatctcatttccttgtttggaaggtcttgcttaaatcatccggacaaaaaaattgttgcctactcttcaatgattttgtttacatcccttaatcatgaaagaatgaaagaactggaggagaacctcaatattgcaattgatgtcatagatgcttaccaaaaacatcctgaatcagaatggccgtaagtatcttgttagaaatttgattgctttggggcatcctgacagatcactttccttgcagaggttttaagtaaaaatttggacattgtgataattgaacgataagttaaaacttaacatgtgttgacagaattagagaagattttgagcagaatctagagaacttgtgaatgaggtgaataaagtgaggcttgaattgagcctttaaggacaaagagaattctttaaggtggtgaggagcgggaaagacattcttggtgtatgaaaaaacagtgtgaaatgcccaggcacctttggagtgcacagataagactgttgtggctgcagtagctagttcattagatcagaggttggtgcgagccttgtaagcatctgtgcagatgagatagagactgccattcaaattgccccccgatacataatgtactgccacccttcatacataatgtgttatttctctgtgattgcttttaagatttttctttgtcttttcagaggttaattatggtattggcatagatttctttgggtttactctttttggggtttcctcaacttcttgaatcagtagatttatgtcttttgccaaattggggaagttaatttggaaaattttcgctgttatttgtttgaatactttttttcaggcccttgttctctctccacttcttctgggactccatgttttaggcgcacacacagtccaaggcagggccaaggctgtggctcaactgatgggactgtgaaaataatacaagttacaacaatctacttttaggtttagacagtttgttacttatatagacagagaaaagaagaagccaaaggggccagctcctcctgatccttgtcccagacaccacaaagacctggatgattaggatatgaattgtgaggtatcccactcctgaggaggccttcttgactgtttaaagaggcattatatgctaagaggggcaaggcagaaagctctgtacctcattagcaccaaactcattagaacctgtcccatgacagcctcccctaggagacagaagagcaaaaaggatacagcctcagaagcctcaggcccctcccatctcgggttccaggaggatcacaagctattcagcaggcaagactcagattagccgctgttcaagctctggcatgcatggtatatatggatacatccaaggtcaccagggcactatgtggagctgttcccctagactctgaagatacaagtgttagtcttctgttgttgttttgtaagtgcctgaggctctgttcagtgctttttttttttttttccagtccattttctctctttgccagtactacagtgtcttgattaccgtaattttatagtaaattttgaaatcaggaagtgtgagttttccaactttgttctttttcagttttgttgtcctgggtcccttctgtttccatattaattttaggatcaacttttcaatttgttaaaaaaaaaaaacagctggaattttgataagaattacatgaatctgtagaccaccttgggggaatattgccatcttacctagattaagtgttccaatccatgaatagaggatattcatttatttatttaggccttttaaattttcgtcagttatgttttgtagtttttagtctatgagttttgggtgtcgttagttcagtttattctaagtattttattctttttgatggtattgcaaatggaagtctttcatttttggattgttcattgctaatgtgtagaaatacaactgatttttgtatattaatcttatatcctgcaatctttcttcctgaacttatttatagttttagtagatttttttgtgtacgtgattcttaggattttttctgtacaggaccgtgccatctgcaagtaggtaatatttttttctttccagttgggttgccttttctttcttttccttgcctagttgccctgactggaaattccaatacaatgttgagtagaattggtgagagcagacatatgtttcttatttaagatcttagtggggcagtctttcagtgtgctgttgcctgtggggttttctaagaagcccttgctcaggatgataaacttttcttctacttctactgattttcttttacttgttgaatgtttttattatgaaagtctattttatcaaatatattttgtgtctgttgagatagtcatatggctttgtcttttagtctattaatactttgtctaacagtgatttttatactttaaatcaactttggattcctgagataaatcctacttgttcatagtgtataatcctttttatatgttgctggattcggttcatattttgttggggatttttgaatctatattcataaggcatattggtttgtagcttttttttctttttgtgatttctttttctggttttggtatcaggtaaatactgactttacagaatgaggtcttgttttgttttgtttttggaagactgtaaaggatcggtattcatctttaaatatgtggtagaattcactggtgaagccatctggtcttgggctttttatcatgggaagggttttggttactaattcaaacctgttacttgttacaggtcttggtttttttttttgagacggagtctcactctgttgcccaggctggagtgcagtggtgcgatctcggctcactgcaacctccgcctcttgggttcaagcaattctctgcctcagtctcctgaatagctgggattgcaggtgcccgccaccacacccggctaattttttttgtatttttagtagagacggggtttcaccatcttggccaggttggtattgaactcctaatctcatgagccacctgcctcagcctcccaaagtgctgggattacaggcgtgagccaccgcgcccggcctccacttgttacgggtctattcagattgttgtcttcttgggttggttttggtagtttgtgtctttctaggaatttgcctgtttggtctaggccgggggtcctccagcccccgacctgtggactggtacctgtccatggcctgttaggaacaggaccacatagcacaagataagcagcaggcaagcaagcattcctgcctgagcgccacttcttgtcagatcatcagccacattcgattctcttaggagcacaaaccctgttgtgaactgcgcatgcgagggatctaggtctcacactccttatgagaatctattacaactaatgcctgttgatctgaggtagaacagtttcttcctgaaaccgtccccccacccctgtctatggaaaaattgtctttcatgaaaccagtccctggtgccaaaaaggttggggaccactggtctaggctgtctaatttgttggcacaaattgttaatagacccttagaatttttttatttttgtaagattggtaggaatgtcccctcttcattcctgattttagtaatttgagtcttctcttttttcttgttcactatagctaaaggtttgttagagtttttgctcttttcggagaaccaacttttggttttgttgattttctttacagttattctctatttcatttctttttgctgtaatctttattatattctttcttctgcgtgctttgggtttggtttgctcttctttttctagtttctcaagatggaaggttaggttactgatatgagatcttctgtcttttttacataggcatttacatctacaaatttcctggtaggaactactttagcatcccataatttaggattctgtaaattttggtgtttgtgcttttactttcatttatttcaaattatagtccaatttcctttgtgacctattggttatttgggagtttgttgtttaatttccacatatttgtttctaattttattccatgtggccagagaacccactttatatgatttcattctttttgacattacctaggcttcttttatggcctgacatgtggtctgtcatagagaatgttccatgtacacttgaatagaatgtgtatgctgctggttttggtggcatgttctgtagatatctattaggtctggttggctagatggttgatagtgttgtttaaatcttctgttttcttgctgatcttctgttctagttcttttcattattgaaagtgaattattgtgcattttttccttcagttctgtcagtttttgcttcccttattttcatgctctgttaagtacacacacacatgtttatatttattattgttataccttcttgatgcattgaccctttctcattataaaatttatcacaaattttgttgtttatgttttaacaatatcctgttttttaaaaaatctatttttccatatcttttgcacatagtagtcagtgtgtgattaggccacagattttctccagggagtaagccttgagcacctgtaatcccacttgcattcacaggtgaggtatgagctttttcaattttggcttcttgcagtgtaatcttttatcattctattgaaattatacctaattttgaaattatttctttttctgaatattcatttgtatttcaattaagatttacaaacaaacagaagttggtacatacaataatatgatgtgtttaacttagaaaacttccctttgtatgcaaatgtaacatgacaggatcaatcattagagtcaacttacttagagaaattttctgtagctgagttctgttttatttgttgagtaccttgggtctgtattttaatcatctgcagtttttttttagcagcttggaataaagggcaaaaggtcataaagggcaaaatataaaatctgtttaatataatataatatgatataatataatataatatataaatagctcaagttaaaggtattagagaccactagaaggaattcagaaaggaacaaaggatggatctagtagtggttaaatgatcacttctgcagtccaggtgcggaatactttgatttatgtgagaggaactctacatttggtaacaaacaatgagatcacagaatatccagaggcttctgacgaaattgttgtttttgctgttaaatataaactcatccctggaaattggagaaaacccactttctgccttttttcttccctacattttaggagataggtggcaaataatacaaaactacatggtcttagaattcatggtttcattatgttttcttttcttcctttgcttgtttcttagaaaagggcaaatgtgattccaataactttgggtttttttatttgagtatactagagacacaggaaagtgtaggcgagaaagtctttggcactacttggtttgaattattgggataatgtctttctaaaaatgtctgttcttttgtttgtaggtgtgaaagatgttttcatgctcttagataaccctagatgaatccagggattctattttgagttcatctaaatctgaaagtccagtaaatgtgcactggtaggttaggtcagtcagtgcagaattacacagtagaggaagaggtaggactgcctcgtgctgatcctgtgatgtgttggttgctttgtctgtgtaatctcattttcacattgctgccatcctgtgaattgtattttgctactatgtacctatgaaagttaagcagagtaaaccagtctgacaaaggtcacacaactagcatatagcagaggcagcattgcaagtgatgccaaactcgagggcctatcccatttttattaataccatgtcatgtgttatgaaaattaccgattttcagagaggaggtctgcatttcaaaggtgaggcatgaactcttttcagttttagcctcttttggtgtaaactttttctttttgagacagagtctcactctgttgcccaggctggagtgcagtggtgtgatcttgactcactgcaacctctgcctcccgggttcaagtgattctcccatctcagccccctgagtagccaggactacaggcgtgcgccaccacgcctggctaattttttgtatttttggtagagatggggtttcatcatgtcagccagcctggtcttgaactcctgacctcaggtgatctccccgcctgtctcccaaagtgctgggattacaggcatgagccaccgtgcccacctaaacttttattaatccattgaactttttacccagtttcactacaaaaatgaagttataactgggagcaaagcattcttttttgttagtatttgggttatctagttgatttattttgtattctctagggatgtgtcttgccttatgcatgtacattttattatcagcttaagtgtaacaatattaggaagataaacataattgtccatcctcttgcagtctgaatctgttgcccctcttctgttcgcgcacaacagccatgcattccactttcatggcacttagcgcatttaattgtccattagactgtgagctccctgtaaggcaggatttagtgttgtttgttattggatctttaacaagataatatctggcatgtgataagcattattttagtcatgattcttctgaatctaagtgactgaagtccacttcagatggtttatgcacataaagggatttattggcttatgcaactgaaaaattccagggtcattgggtgaaggcacggtgaatccagggctgaaagatgtcatcagtatctgtctcatctttgtctcatttttctcctgtgctggctttgttgtaaggcacatttcctgcttcctgtgttggctcctgttcttgcctactcagggttggcatggcccacggctggtcctcagaccactcttctccattattgctcattctctgggtgacctcatctcataccacagctttaaatacctcttctaaattgatgatttccacatttatgtttctggccttgatctcttgctgaagctctaggtttacatatacagcttcctattatgtgcttctaattggcatctgaaatgtatgaaggctgcgtccaaacttttgatttcccccacacataacacctcctgttactctaccaatgtttatccttcagtaactggtaccaccatttactcgtttgctgaggcctggaacctgagtcctgattttctttcactctcacccacttatactcattagccctatcttcaaaaggtgttccacattcacctacttcatgcctcctctgccatagacatctttcattgctactgccagaactttcttactcatctttctgtctctccttttgccctctgaatcatcacacagtagccagagtgaccttttaaaaattactgtagctgttgtcactccttgcttaaataaaccattcagtgccttcttattgcaacctagaagcaaatccaaagtacttgtcatgtcctggcgtctgactgaccacctcatcttatttcttactacttttactcctgctccttagttccatctggtcttactgtttttctttgaatactccaagtttgttctgtcctgaatctttacatccgctgtctttctgcatggaaccttcctttagatcttcccatggctagctcttttaggtctctgttcaaatatctatcatttcgactgagagaccttcccagcactttatgttcagtagtgtttcctgtaaacccgtatcgctttactctcttttattcatttgtttaatagcacttaccactatcgaacattatacaaatcttatttgctttcttgtttattgttggttgctagaatgtaggactagctccataaggccctggagtttgtcctggtcatcattctatccaaagcacctagaacatgtgttgacaaactatggcccatggtctgaatccggcccactgcttctttttataaataaagttttattggaacacagccaagcttgtttatctattgtctacggctgctttcatgtaacagtggcagagttgagtagttgtgacagagaccatttggcctgcaaagcttaaagtatttcctgtctggccctttatggaaaagtttgccaaccccatccattgaagggtttttggtagtagtatttgttgaataagtctggtgattggtggcatcgttgtccttcagtcacttcaggcttatctgaagcagataagcctggttctcctgaaccagataagactttggtgagagacccccaaagggtctgtatcgttgttctctagaactctatacaggcttcttcattttacatcagcaatctattcctgaaaatcagacattctgtgcaaaaaagtgactgagagcctacttccttcttaaaaatggggacattataaaatgttacatgtctacccaaaaccccagtcagtgtcttaaaatagaatcaaactaaaatactattcagcaataaaaaggaacaagtgttggtacaagccataacttgggaagatctcatggtaattatagcagagtgaaaaaaaaaagccaatgaatccccaaaggttaaataatgtatcattccatttacatgacattcttgaaatgacaaaattacagaaatggagaacggattagtggttgtcggggattgaggaaggatgctggagttataggcgggtgaacctgcaaaaggggtgccgaaccgttctggctctcacctgtgagaggggatctgtgaccctgcattattaagttacagagagctaaagacatgcacacagctactcctgagtaaaggcacaagttaacctgggaaacctgagtaagatccgcacatcgtgtcactgtcagcatctgggttgtcacatactatagttttacagatgttaccattggggaaaactgggtaagggtacacagaatctctcttgtgttttgtaaaactgcgtgtgcatctacaatgatctcaaaataaaaatatttaattaaaaaaaacccaaactcggtaaagcacctgtgtatataacagactatcatgttaggatgtgcactgcttaaaacatttctttctgattgccatagaattagtatagttgtcagcagacagttggctttgtatgcgggaacatggagcctcttaatgccaccattatgccagaagtgcttcttaaatgtctgtacacagttctgactttttaccaacagtgtatggaatgcatcttgtgattttgtgtatacgtgtatatctttttgtgaaatgttgtatggaatactttagaatataaaaaaaagtttcttctgtaaacattgactggcaagggtattgagaagtttgggaattagaaacaaagaggtaataaccagatggatgtttttgaggcatgcaagtggctctttttgggtcacattgtcatccctggggcagtgctgtttgttagggtgtgcagtcaggtgacctcccctgggggcacaggctgtcaggtttgggcccactcttgaaggaaaaagctaccaggtttgggctcattcttgaaggaaaaagaattcttgttatccaaggaaggaaaaaaggggatgctgaacaggggaaaaagtggcagatatccacaaggactgtcagtgtttggcgaatgcatgtccttttcattatctgcttttgcttcaggagggaaacatagtttaatttctttgatttttgttggagttgaattctgatacattattactggaaacaggagaagcagaataccttgatactgaagggtagacagcgtagccagtgtcacactgccagtgagtgttgggctgagactcaaacccagctctttctgagaccaaaatttgtgctcttaatctgtacacccactgcctcccttagaggacgacattaaaggaagggtggctgggatgtgcgtgtgtgtaatacgtttcccccagtgcctggcacatgtagattcaggaaatctatttatatatttttcagattataactcattttcttctagtagaggaagcatcgccattgaatcagtggactgttatttttctagtttaatgctactcacgtttaacccgttggaaatgttatttaactcttttaacaggagaagggaggttattttctagaccagctttgtaagctttgtccaaattgctgtgttaagcaactgtgggttagatttcccagatctcacaacaaaggagagtggcatttattttccatagcacatttaaatcaaaatttgtttatgaggtataaaaacattttctaggtttttgaactgattgaaatctattttactcatgttgtgagtatagcatcgccattgtatgcatgtatggatatggataatagatgaccttcattaaaaaaaaaatttccctgaaaccccccgtctttaggactgtctctgtttactggtgaggagttcgcctttcgctgtctgttggcatgtgctcctcgatgcccacacaggtgacctttactaccttctattttgtatatcagtattgtaatgcagatgctgattcatctgcctgcaactgttcacgtactttaaaatcaatcataaatgagaaagattgagagaaggaaaaagatgagaagagagaccttcatgcattttgttttttggcaagtgtggaaaatgatgtaaagtgtagttagtgctttggcatcaacaatgtgatttgtgaatgttagcttttctgtgatgacatttaaatgatgaatttcaagattaaactgaggagttccttaggcgaacttacagagttctcctatatgaccgttcctcgtccttaaagcctgaggagccaggttcatctgaatggtacttccaccaagatgcagaaatactgtcactctttagcagaatggttattaagtagaacgaagtgtgagcttactttgcctgtatatattgcttacattacatactgaattatttgatagactatatgtggttcagatatcaaaatgcatagtttacccccagccgtttacctagttcttccaaccacaacccctacttctccccacactgttgggctttttgcttttttcactaaatagtacatttctgagatctttccatattcctatataaagactttcctcagttaaagatctttcattgtatgaatataccaggatttatttcatcagtctcttctctatgggcattctgattgtttccgttttttcacgactagaagctactgccatgaatagccttggttgcacatgtcatatcgcatgtggacaagtaatgattgtagaataaattcataagtgcaattctgggtcaaaaggaatgtactgttataattttgacaaacacttcaggttgtccttcatcgctattgtgccagtgtcaactcccctgtcccacatcattgctaacagtgttagcaagatttggatttgccagttctgccaaggtgtaaaccggccttcttgcacagttttatttcgtatttttcttatgagttggagaaccttttttttcttttatgtgtattctaattttctttacctatttttctattggggtattgatctttatcagtgtataggagtattttctagattagggatatcacccatcatataaaataaaatacatgtatttttctgtttttgtattttgactttgttcgtggtattttattttttatttttttgagacagcgtctctgtcactcaggctggagtgcagtggtgcaatcatggctcactgcagcctcaatctcccaggctcaagtaatcttccctcctcagcccactgagaagctgggatcgcaggtgcataccaccgcacctggctgattaattttttattttgtagagatggggtctcactatgttgcccaggctggtcttgaagtcctggccttaagcagtccttccaccttggcctcccaaagtgctgggaatacaggtgtgagccactgtgtccagccatatgatacttttttatgtaaaagtttttgatttttttagtagatgaattaatcagtcttttaaaaaaatgtgttccgtagttttgataatagctataaaggcctttcctctaccaaggctttcttctagtatatcatttcaattttgttgtttaagtatttgatttacttggaatttatgttggtttaaaggttgcagtgtggattcactctcatttttgtttctgatgatgctggtggtcccggcaacagagcactgtcatggctgagacctgtcttcccttctcctccgtccttgccctagtccctatacccttactgctccatccatggacaacttttttacttcaacttttgcttcctaaccacgcattccagcatgcagaactcagtccttcctttacgatgtctcagttctactattttaagtccttgaggattttatgaacatattgatcaaatcacatttattgaacatttgttaggagatttttggtttttcaagaagaaaatttccaaagtgaagcagacccagtctgttgcccactgtttaaaaactgtttatatatattgtctggttttatgttgtttaaggtagggggtaaattgttattccattatgcccagaagcagaagcgatagttggagattttaacacctgcttttcagccatgggcaggactcatagacaaatatcagtatagactgatgttttatacattatataaacatgatgatatggatcaagtttgtccaacctgcaggccgcatgcagcccaggatggctttgaatgctacctaacacaaatttgtgaactttcttataacatgagttgtttttgttatttgctgttgttgttgttgttaagctcattagctattcttagtatattttatctgtgccccaagacaattcttcttccagtgtggcccagggaagccaaaagattggacaccgctgatacagatgatcttggtagtactgtcgtaggtagccaccttcacctgagtgatatttatagaccttcccttagtacttccaaactccactttcttttcacctgcatgtgtcatgttcactaaggtagaccataggctggcctgtacaaaagtttcagtaaatgtgtaagggattgaaatcatagagcacattctcttactcataagatgatttctagaaaaattccaaacttttggaaattaacacatctgattgatttgtcaaaaaagaaatcacaggcaaattagaaaatattttgacctgaagtaccaagttttgtgggataaagcaaaagcagccaagtgtggtggctcatgcctgtaatcccagcactttgggagtctgagaagggaggatagcttgaggccaggagttcaagaccagccagagcaacatagtaagacactgtctctgccaaaaaaataaaaataaaaaaagctgcgtatggtggcacatgcgtgtagttctatctacttgagagactgaggtgggaaaattattcgaacctagaagtttgagggtgcagtgagctatgatcgcacaactgcactccagctaggtgacagagcgagaccccatgtcttaaaaagacaacaaaaacgaaagcggcgcttagaggagagcttattgctttgagtgcttccttttttttttttttttttggagatagagtcttgctctgtcgcccatgctggagtgcatggagtgcagtggcatgatcttggctcactgcaacctctgcctcctgtgttcaagtgattctcatacctctgcctcccgagtagttgggattacaggcatgcaccaccacatccaactattttttttgtgtgtttttggtagcgatggggtttcactatgctgtgttggccaggctggtctcaaactcttgacctcaagtaatccacccacctcagtctcccaagtgctgggattacaaggtgtgagccacggcctggaatgtttctattaataaagaaaggtctgaaatcagtgacccacagttctactttgagaggatagaaaaagaagagcatagtaagtcctgagtaagtaagaaagaaagaaataaaagatgacagaaatcaatgaaacataagacaaaaacaatagaaaaaattcacaaaggcaaaagttgatctttgaccaacaaaattgatcaagaaaaaagaaagagagcactaattaccaacactatgaaagaatgtgtagttatcacatcagtcttcaataaactcaaaccttggttgaggcaactttcttcacctgagacactctgaagacccacgcttttgggtcctgacttccttttgaagccctaatagtattttgttgcttgtagttccccagacacactgctgttctttccttcttgctgtttttctaagtcctttttttcccctcctaatttaaatgctatcttcttttccttcttctagggattggcgaaatacctcctctagcctgtttgatcttcttgccccctgtctgtcacccctcttgcccccagcctattggttagatacatttgtttctattatataatccttaatgtgtatctgtcagcacttaacatgttcttctgtaaattatctgactaaatatgggtctttattgtttggagaatatatttggcaatatggcttgtgacttggaatattgcgtttttgctattcttatgggaaaatgctttaaattctaagtacctgaattatgaatgagctttaagatctcaatttagtttgtgtatccatctgggattgcatagatttctattgacctgcccagattgataggaatactgtttgagaatttcaaatattatccattatttttaggaatattttacatcagagtgttgatcagctattttaaatgctgtagaggaaatagaatatgtatttggatttcgcttttatgtgaagtgacagtgtattgtagtagttaatatgcttcatttggttatcagactgaatatagttttattgtatttttgtattgttaagtgattaaactatgtgtcaatatatttaatgcttgcagtcaatttttattactataacctggttataatcagtatattccttagttcttaagtcttttcctcagatgccctctggtaaatataattcataattaattaataatagtgttgaatctttttagttgtcacaggggtactttgaagaactatgcctataatctttgccttggggtttccataagttgatctcttaagtttagatgagtgcattgcttgacaatgaggatgttttcttggtaacttgagaattcttaaagagtgaataatcaagccagtaatggaagtgtgacaagtctttctctggttcattatagcagttagcttctgactaaaccaatttaatatgttttttgtttatacctgatcttgttgctaaatgaagaatttttctttctcaacttagataacagctatagtagccctgtcttcccgttgaatcaatttaaattatttccataaagctttcagaagtaaaattggagaaaaatatttttaggattttttttccttttagctgctgatagattaatagtatgtgaaccttttaagacatttaagattacagcaaatcaaaaattcactgaaaagaaatgcttttgtgtgtaagtggtgcctataaagtagataagggcatgtctcttttactatgtttcaagtaaccaaactttcctcctcttttttccctaggttcttgattattacagacctctttctgaaaagcccggaattggtacaagccatgtttcccaaactgaacaatcaagaaaggtaaccccccaaccagcgtggtctggagtatttagcattccatatagggtattcgatgcacgtgactgaaaagctgtgtggtttctgagttggcacagaatctctaaatacatgtttctgtgttggtaatggttttaaattggttggttaacattacagcttagccacagtaggcagtgatttatggagggtagcaggatccaggttggtgccattattcagtaaatgcatattaagaaaaacattaagaacaaaatattatgcatatgcctggattttagaatagtaatttatgtaactgtgtattacagttgaatatttgaggtgtactcatttgtttaggtcatgggtgttattatttgtgatacactctgctaggtttgtaggtttctaatggataatttggactaaaataaaattgacgcccgtccacaatgtcacagttactgtagtaggaaaaacagtgacctaggagttctaagacactggccctgtgctttgctgtgattatagttctttatgtgaccttgttgggattcaggttcgtgtgtgtgtgtattttttttttttttcctaaacctctatggtaaggtacaagggattcagtttcttgacctgtaaattaaggagattgaataaataatttgcagtacacttcatttcaatagaatatatttttcctaaccttattagaaatgttgccttaggaaaataacaaaatatattcagaaactacagatctagtgatgaaaatctcttaaagttgttaatcttttgattgtagtcacgagttttagtggttttggactttttactttgtatttaggtttcagtagttaagctttgtgtacttttgtagtcttttattaattaggtcatttttcttctttaatatctcaaacaggaaaagcttatgcttttaaagtcatatgaaataccaggtttataagtccaattccagtgcttctttccctatatgtatacccccattacagatagagaagtatttgtagttttttgacctaaaagagataatacgacatacagtgctaaaaattagtatttttttttttttgcagtaaggaacacctgaatacaggaagaatgcacagtttaattgtattttaatattcaagctgatattttccatagtctatcaaaattatctatttttaaatggtttattacataactacatggtgatggtagactaaaaatgttttatttttattgataaagttgtatcaggtgcatccttacttcattcaaggttctgctcagttgtcacctcctcttgcccctgctttatttttcttctggaggagatgagctgtcatttcatcacatcattcattcatcgtgttgtgtcacatacctgcttgttattgtagcacatttccattagattgttggcaccctgagggcaaggattcatcccttcttattcttcattccacatttccagtcagtggttggcacacagcaggtgctcaaaaagaaaaaaaaatagtttttcagtgaaagcatgagtgaatgaatgaatattcttactcaataaagtgttcctctagtatattgattaatgtaatcttatcttctaagttggaagcctcaaggttatactcagcttctccactttaccttttcagttcatactggtcagtaaaccttatcagttatactatcccaaggtcttatgtatttattctcttttttgtcacagccctagtttaccctatggaatctttgactagattttgacaatagcctttgtcaaaaaattgtggtaaatcacacataatataaagtttactattgtaaccttttttttttttttggaaaaggtataagacagggtcttgctgtgtgttgcccaacctagagtgcagtggctgctctcaagtgtgatcgtagtgcactacagccccaagctcctggcctcaaacaatcctcccacctcagcctccccagttgctgggagtacgggtgtgggtcaccatgccagactaccattgtaaccattttttaatgtacggttcagggggtgtgaaggatgttcacattgctgtgcagtgaacctctggaactttttcatcttgtgtatcagaaactctgtacccattaacaataaactacaatgaggtaccacttgatacccattaggatggctactatcaacaaactgaaaagaggaagtttgggcaaggatatggagaaattggaacccttgtgcactgtttatttcctactggtgggaatgtaaatggtgcatctactgtcttaatctgttttctgctgccataacagagtcctggagagtgggtaatttataaagaaaagaaatttatttctaacagtctgaggctgggaagtccaagaacatggcactggcatttggtgagggctctcttgctgtgttatcccatggtgggaggtgagagggcaagtgagtgcatgtgagcattacagagacacagtccctgcccttactgtgagggtaataaccatgtgttgttatgtacaagaatgacagtgctgtgtaaattcttaagcttttttcttgtgctagttcttttcattgttgtcaaaattagttgacttcttcacccagaggctggtagtctattcatgcagattactcggtggggaaattttggatatagactcatcatcaattcacgtggcatgattcagcaaaaatgagagcctacatttacatacttgtctggtctcctttccaggtgaattggagtgaatattaacaaattggactagctgctcgtggtaaacagcttgtgtagttttcaggtttatgatctctgtgtacggcatagtagttaaggacagatgctagtgctgccgcttactactttggataggttaatgagaataatagtagctaccccatgaaattgttatgataactgattgaaatgtgtataaaactctcagtgcctggcatgtaatggtcacccccgtaaacgtgttgcagggaagaagataattgactttggcatcagaaagagttcaaataccacctcagtacctctgtaacccagggcaaataccttaatctataacctgagctattgctatttctgcttccatgctcttactactattactgcaactacaagtctaacaactactgctactatgctgatgaccttgccgttttctccaggtagcatcaccgttatgtatagaaggcaccatgtagcccttgtcatttaatcctcacagactctgtgaaataggtattattcttgacattttccaaattggagttctgaggcctgtagttccagctactcgggaggctaagccaggagaatcactttaacttgggaggtggaggttgcagtgagccaagattgcttcactgcactccagcctgggcaacagagcgagactctgtcacatgaaaaaacaaaacaaaacaaaacaaaacaggaatcgtaattttaaggcagactatgtaagtactgtatttaatcaggggagaattagaaatagaatgctaatgacagccagtgattgagagacaaaattatggcagcatggctctgtttggagaggtgtgtctggtgaactcagagcagcctgagtgatgatttctgggttaagggagcaagactttcacaccaatgtgtaataattctagacggctgtagcctctaacccctttagctgggtctttcctacttttgcatccttcacaccacagtgaataagtcaatgagtaactagcatttgtcagaccacttgtattcttttatattttcaaggaagagatagagggttgggtggagtgtctggtagggagacccgtataccagactaaagagcttttagactcattccttaacagtgggaaccattagaaggtttaaatggcagatgacttaatgtaagtaggatcatttaatgaaggatagtctattctgaggtgatagtcaaacttagtttgtacttttatattttaaagattcatttctgactttgactgcttctttcctttgaaatcactcagtacccacatcgttagctctctcatcttgtaaccatataataaagctgcattatacaggcggcatctgctgggccagggagaagttgagccagaggaggctggcctgtgtgtcattgtgtaaggaaggcagtgtgtgcttctactccctttagcacttgcagatctccctgcacctcatccgcttggacccccggagtctcctgttgctgctgaacaactttgatttccaccaccttggggcccacccttcctgtcctcacctcaggactgcccatttgggatctgcccctgattcaggatctgcactattgttcgttttttttcttcagttgtaatccatctgttttctttctcatttctccacatccctatctgtggataccttaacactcacaaatctgataaaattattttcttctatttcattacctattcaagaaatagtgaactaggtgccaaattccctgaagccagggatcctgacttcttatacttagcaataactgttacattatgtaatccaatttaaaaggaatatatttagagtacgcatttgggccacgtggaataggtggcctcttagcattccttgaaagtcatatgtgtgtgtgtgtttatatatatatatgtgtgtgtgtgtatatatatatatgtagatagatccacttatgatagagatatatatagataggtatatctatattttatatagacataaaatttcagtagcttttggggtacaagtggttttggtcacatggatgggttgtatagtggtgtggttttggtcacatgggtgggttgtatagtggtgtgatttttggtcacatggatgggttgtatagtggtgtggttttggctacatggatgggttgtatagtggtgtggttttggtcacatggatgggttgtatagtggtgaagtcggcgattttagtgcacctgtcacctgagcagtgtatattatacctgatatgtagtttttattccttaccctcctcctaacttcccgcctgctgagtctccagtgtccattatactactctgtgtgcctttgggtacccatagcttaactcccacttgtaagtgagaacatatggtatttgatttttccatttctgagttcttcacttagaataatggcctccaactgggcatggtggctcacacctgtaatcccagcactttgggaggtggaggaagtcagatcacttgagaccaggagtttgagactagcctggccagcatggagaaaccccgtctctactaaaaatacaaaaattagccaggcgtggtggcgcttgcctgttatcccagctactcggggaggttgaggcatgagaattgcttgaacctgggagacggaggttgcagtgagatcacactactgcactccagcctaggtgatagagtgagaccctgtctcaaaaaaaaaaaaaataaaaggcttccagctccatccaagttgctgcataagacattatttcattcttttttatggttgagtagtattccattgtgtatatatatatatatcacgttttctttgttcattcctcagttgatgggtacttacattggttctatatctttgcaattgtgaattgttctgtgataaacatacgcgtgcaggtgtcttttcctttgggtagatacccagtagtgggattgctggattgaatggtaggtctacttttagttctttgagaagtccccatactattttccatgaaggttttactattttactttccccccagcattgtatatgcgttcctttttcactacatccatggcaacatctgttgttttttttgactttttaataatggccactctgacaggttaaggtggcatctcattgtggttttaatttgcatttccctgatgactagtgatggtgagcattttttcatgtttgttggccatttgtagatcttcttttgggaaatgtctattcatgtcatttgcccactttttgatggaattatttgtttttttctcactgatttgtttgagttccttgtagattctggatattagttctttgtcagatgcatagttgcaaatgttttctcccattctgttggttgtctgtttactctgatgattatttcttccgctgtgcagatgcattttagtttaactaggtcccatttatttagtttttgttccatttgcttttgggatcttagtcataaatgctttgcctttgacaatgtcataaagtttttcctaggttttctcctagaatttttatggtttctggtctagatttaaatctttgatccatctcaagttgatttttgtgtatggtgagagatctagtttcatttttctacctgtggctatccagttttcccagaaccatttattgaataggaggttctttccccagtttatgtttttgtatgcttttatggaaggttagttgattgtaagtatttggccttatttctggtgtttttattctgttgtattggtctgtatatctagctttatatcagtacaatcctgttttggttactatagacttgtagtataatttgaagttggagtaatgtgatgccttagaattgttctttttgcttaagattgctttggatatttgggctcttttttggttccatatgaattttaggattattttttctaattgtatgaaaaatgatgttggtattttgataggaattgcattgaatctatatattgctttgggcatatgatcattttaatagtattgattcttctaatccatgagcatgggatgtatttccattagtttgtgtcatctgtgatttctttcagccatgttttatagttttccttgtagagatctttcaccttcttggttaaatatatttccaggcatttgattttttttttttttttttgcagctattttaaaagggactgtgttcttgatttgtttctcagcttagttattgttgatgtataccagtgctactgatttgtgtacattgattttgttacctgagactttactgaattcattgatcaaatctaggagtctttcggtaaagtctttagggttttctaggtatatgatcgtatcattggcaaacagagatagtttgccttccttttttccaatttggatgccctttgtttatttctcttccctgattgttctggctagaccttccagtgttatactgaatagaagtggtgaaagtggacatccttgtcttgttccagttcttaggggcaatgctttcatctttttccccattaagtatgaggttggctatgggtttgtcatgtgtggcttttactattttgagatatgttccttctatgcccagatttttatcataaagggatgctggattttgttgaacgttttttctgcgtctattgggatgatcatattttttttgtttttaattctgtttatgtgatgagtcacatttacttgggtatgttgaaccatccctacatcctaagatgaaacccacttgattatggtgaattatctttttgctgtgccgatggattcagttttctagtattttgttgaggatttttgcatctgatgttcatcagggatattggtctgtggttttctttttttgttatgtcctttactgcttttggtatcagagtgatactggcttcatagagtgaattaggttagagttaggtaggattctctctttctcaaccttttggaatagtttcagtatgattggtgccaattctttgaatgtctggtggaatttggccatgtatccgtctggccctgggttttttgtttttttggcaatttttgttattgattcaatctcactggttgttactggtctgttcagacctcctatttctttctgattcaagctaggagggttgtacgtttccagagatttgttcatttcctctaaattttcttgtttgtttgcacaaaggtattcatagtgtccttaaatggtcttttgtatttctgtggtgccagccataatgtctccatttccgtttctatttgagctaatttgaattttctctcttcttggttaatctagctaatggtctatcgattttatttattttttcaaagaaccaacttttatattttgatcttttgtttcgatttcatttagttctgctctgatctttgttatttcttttcttttgctagctttgggtttggcttgttcttcttgagacagggtcgtgctgtgtcacctaggctggtgtgcagtggcacgatcactgcagccttgaccttcctgggctgaagtgatcctcccatctcagcctcccaagtagctgggactacaggcatgcaccaccatgcctgactaattttttaatattttgtagagacagtatttcaccgtgtcgcccgggctggtctcaaacttttgggctaagcaatcctcctgcctttgcctcccaaagtgttgggattacagttgtaagccaccacacctggcctagttggttctgtttctctagttctttgaggtatgatgttagattgtcaacttgtggtctttcagacttttcgatgtaggcatttagcactgtaaactttccttttagcactgcttttgctgtatcccagaagttttgataaattatatctctgttatcatttattttgaataacttttaaatgtccgtcttgatttcattgttaacccccaaatcatgcaggagcagcttgtttaatttccgtgtatttatgtagttttgagggttccttttggaattgatttctagttttattctattgtggtctgagaagatacttgatatagttctgtctgtctgtctatctatctatatctatctatctatctatctatctatctatctatctatctatctgagactgagtctcgctctgttgcccaggctggggtgcagtggcacgatcttggcttactgtaacctctgcctcctgggttcaagtgattcttccgcctcagcctcctgagtagctggattacaggcccctgccaccacggctggctagttgtttttgtatttttagtagagatggggtttcaccatgttggccaggctggtctcgaatgcccgatctcaggtgatcccccatcctcggcctcccaaagtactgggatttcaggtgtgagccaccacacccagccaatatattttgatttttaaaaaaataaattgagacttgctttgtggcctgccatgtggtctgtcttttcttaggtctagtaactgttttgtgaatctgggagcttcagagttaggtgcatatatatttaggattataatatcttcctgttggatcgatccttttatcatcatataatgaccttctttgtcttttttttactgttgttgctttaaagtctattttatctgacataagagctgttctgcttgctttcggtttccatttgcatgaaatatctttttccaccccctttactttgattctgtaagattccttatgttttaggtgagtctcttgaagacagcaggtatttggtttgtgatttttttttttaatccattctgccaatctgtatcttttaagtggagcatttagatgatttatattcaatgttaatactgagatgtgaggtactatcccagccatcatgttgattgttacctggatattttgtgttctccattgtgttactgttttataggtgctgtgcattttgtgctttcaagaggttccatgctggtgcctgtcgaccttttatttcaagctttagaacttttagcctcaatttatttttaaagattatatataaataagggaaaacagaaattctctaatactgtgctcaactgagtggaccgtgtattagttttattttggattaattattgtcacaagaaatctgacgttttaggagttttgagaattgctaaggtctgtaggtgatttttccagactgatgatatttcccatcatttggccacagtacaggaagcgtttgctatagttttatttcttacttgaagcagtaaataatttaaatttttttcttggtaagaaatgttccatgcctaatttgagtgtatttacccttatttgctaataagcagtttagatgttcgtaccctgtcttctatagaaattagaattatacgtataatcccaaatcaaaatgtaattttgagcaaatgtgctaattgatttatgctagacagattgacctatgtgtgattcatttttcctaggagaaggaaagagatggttgaaaagaaatatttatttggtaacttatatattgatgtaaaaatggcacagtcttggtcttcagatttgtgtttgtgtaaactaaaataaatagtaaagtttcacagtaaagactaccaaatgagtggttaaagcacctggctcagggcacagattgaatcctagcttagactctcagtggttttgtgacactggacaagttaattaacctcaccaagccttatttacccacctttaatgtgaaactaatggcagtacctgcctcatggagtttttgtgaggattaagtgatacaatgtgtgtaacatgcttagctccgtagaaaatggtgaatgaatgttagcccgtttcactttgctgttgctagtgtcgtcgatgtgttcatacaaaaaactgagcatgtctaaaatgtccaattattttaatgttgaaagtaatggacataaaaggtgcattaagcaattctagtttctgtggccaagacacatcaaagaaatgaagaatttaaaaaataggtgattgatgaagattaactttattcatgtttttcctagctagacattagaagcaaggtaaggaatttaaaataataatattcccttaaagttgctttcctaggtatttttagcattgtataatttaagtattatagattcatgcagaaatcctttatgttttacagagttacactgttagaccttatgatagccaagataacgagtgatgagccactcaccaaggatgacatccctgtgtttttgcggcatgctgagttgattgcaagcacctttgtggatcagtgcaagactgtgctcaagctggcctctgaggagcctcctgatgatgaggtaagggaggcagatttcccaatctcgggtaaaagagaatggacagattttctaactcagccaagtcctgtatgagaattcttttttaaaagctttaaaaaatattatgtaagtaatgtatccatatatgagaatagttggaaaatttagataagggaaaacagtgtccttattcctaccatccagagtcaatgacttaggcaaattctggttaattttctagacagatgacatcagatacatgcacacagacgtagacatgtgcacatatgtatctattaaaagtggagcctttctgtgccttctgtttgcaggttcccattttttcttcggaatgtaagctctaggagggcagaaattttgactgttgtgtccatagtactatgtatatggtaggcactgaacaagtatttgctgaatgaataaataaataatacattgtaaatgtctttttaaataaatgccaacataggctgggcacggtgcctcacacctgtaaccccacttctttgggaggccaaggcgggaggatcgcttgagcccaggaattccagatcaccctgggcaacatggtgaaaccccatctctgtaaaaaatacaaaaattaactggacatggtggcacatgcctatagacccagctacttgggaggctgaggtgggagggtcacttgagcccaggaggttgaggctgcggtgagccatgattgccccactgccctccagctcgggtgatgcagtgagacccttgtctcaaaaaaaaaaaaaaaaaaagccaacataacatttcaagtaaagaatttcctatttatttgtccaaatccctgtagttggacatttaggttgtttgtttgtttgttttgagacaaagccttgctctgtcgcccaagctggagcacagtggcacaatcttgactcactgcaacctctgcctcctgggttcagtcaattctcctgtcttggctacccaaataactgggattataggtgcacaccaccaccatgcccagataatttttgtatttttggtagagacggggtttcggcatattggccaggctggtcttgaactcctgacttcatgtgatctgcctgcctcggcctgccaaggtgctgggattactggcataagccaccacatctggcagtaggttgttcttatttctacttattttagataatactgtagtacatgcctttatagttacatctttgcacatttccacagctgttatcctaggacataatcttagaagtgaaattgctatgtataaggatatcacatgtttaaagctcttgatacatacttccaaactgctttctagacagtttgcttcttctcttctttataggagattcctagtggtatactgtcctggttaattatttaaactattttttattctccttaagcctaccttagatcattcaggtcttgttttatcagggcgtggaagggagcttatgttaattctctatcccttgtctttacttcagaacttcctgtttttatctattctccctttcttctgtcataaagttagaattgttctttctctggaccactcagctgtaaaaagggatgcacttgtgatacaacagggaagaatctcagaagtgctgagggagagaagccagacagactagaaaacatgctggctgattccatttccgtgggattctgtagcaggccagatatatcggtcatgacagaaaatagatcagatgtcacctgggtctggaaatgaatgagtggaattgattgcaggggaacacgagggaactttctggatagtagaatgtggcacttagctgtataccttgacacaactttgtactgtatgcttaagatgggtgtatttcattgcatgtatattatacctcaataaagctgatttaaacaataaaagatgatagagagttcctttgtatgctgatatgaatggtcaggtagagagggagtaattgatgctggaatcactgttggcaaatgggcaacactggaggagagggattggaatccagagtggatactcatccactgtccacaggcgggaatgtagagaatgtgatccgatactgtgaaactgttaactcctgttgtaaatgcagctcatggctatgactgctcgcccacgagagtgtatttccttttttgtgaatatactttcgttcaggaccattttgatattgattttctgtgctttgtcatatagaccatgttagatcttactaatcatttcgttaactttagttctcattttctgtgataggaaagaaaggtctttattcaggggcttgcgtttactttctggagatagatttgcctttgtttccagcaggaggagcagtgagtcatgcttaagaaaagttttaaaaattctctaagagacagagaaaagacagatcacagctttaaacttttcagggcacttctgtttaaaatataggtgatttcagtattgtagtgagaaattcctggtgtaacttttcatatttaggaaaacttctatttttcctttggacttttttctctaagatgggaagtatttttatatattaatggaatggaaagttgtagactgggaacagtggctcatgcccgtaatcccaatactttgggacgccaaggcgtgggaggattgcttaagcccaggagttggagaccagcctgggcaacataaggagactccatctgtacaaaaaaaaaacacaaagaattagctgggtgtggtggtgtgtgcctgtgttcctagccaccggtgaggctgaggtgggaggcttgcctaagcccagaagattgaggctgcagtgagctgtgattgcgctactgcattccagcctggggaagagtgagatcctgtctccaaaaaaaaagaaaaaattgtaggcagttttcttttgcaaagccaaattaatttacttttggaagtttattgagctatacatttatgacttgtgcgtattaatgcacatatgtcatactttttttttttttttaaaagaggaccactttgccagtatttaaatatgccaaagaccaagtgctatactggagctggcctgtggtgacttctaagagttgattattaagtgcttagaaatttgtgagctgattgttaaattgttggtaccttgaaatcatccatggtggaagtagttgtgccatggaaaccagcaaatgctacaaatcagggttttccacctgcctcttccaccccagccattcttctgccaaaccactgcatttactcattggtgatctttttaggacaagatagatattcagtaaagttctcaatgctatgactgaaaagtgagaatggaaacagttgtatttatagcatgtgttttttaatttatgtaattgtttggctttaaaatcccaaggttttcttcatacgtttctttataaaaatagttttgggttctcatgttaatgtacttattcctgtcttttgatatattttgtatacttgtttccagtttttgatatatttttgtcagttcagaatcttgttcacttgtagcaagccttgccttttctctgaaagctcaaaaaacattccttttagctttgtattttctgatatccatatattacaataattgttgccaggttgtgggatttgcattctgttttaatctttgcaaccccaggttaggccatactgtagtacctgttatgcagtaggtattacatatttaattacataatacatatttaatacatattctacaataaatagtgtattttttccacatattaagggcttaaatttttgtattacgcaaataatgcttgctttgttgttaaaaattatttaagctgaagtcagtgaaacataaagttacaaagtttcagccaggcgtggtggctcatacctgtaatcccagcactttaggaggtcgaggtgggcagattgcctgaggtcaggagtttgagaccagcctgactaacatggtgagacccccgtctctactaaaaatacaaaaattagccgggtgtggtggcggatgcctgtaatcccagctactcgggaggctgtcccagctactcgggaggcggaggcagagaatcacgtgaacccgggaggcggaggttgctgtgaactgagattgtgccattgcacttcagcctgggcgacagagcaagactcccatcttaaaaaaaaaaaaaagttacaaagttttcccctttttgcccagcctccatttgttttctatagatctgcatatccttttttttttgttttcttttcaaaggtctttttttgtatatacacacctatatgttttttgttttcattttttgcactattcttcaacttgctgtttttacttatgatgtaacttgtacatctttgcactttagcatgtgtatattcattgtatgtttttaatagttgaataatatttaactatatagactcatcataattttttcatttgttccctatagactttccagctgctttcaggttgctttttttttcttttaacctttacaaataatgttatagtgaacatccttgtacaaatttcggttaagtaaatcaaatccaggttataaattcctggagttgaattgctgggttgaagaattatgtgtatttaaaaactttagagagatttctaagttgcacatcagtgcaacacaagattgcacgagttgccttttgcagatctgatttaattactatttctcgttaatgtttttcagtgaccattatgtttgtttttgcatattaggttactctttaaaatgcatttattaaaaagcattttctggaaattagtctttctgtcatacatacagtaaactattgtttacgtaatttttgtttgaatttatttctgatgttctgttagccttgtagtcgttttttgtttgtgtttaatctagttgaggttatcaattttatccttctggcctctggatttttttttttttttttgacaactgacagccaagaagatttttgtttgtttgtttgttttttaagtaaattctccacttagattgtggaaatacaaacctacatagtctagttctttcagtacttagttctcattttttatttatctagaatttatttttgagtaaggagtgagttatggatccaaatgaattatttatgtcttttgactatccaagattataaaatcttttggtgtgagactgactgggtttgaatcttgatttcttctgttacaggcatatgatcttggaaaagttacttagcctctctctgcccttctttttcttgaaatgggttatattattattattattattattattattattttgagatagagtcttgctctgttgcccaggctggaatgcagaggtgtggtcttggctcactgcaacctccgtctcccaggttcaagcgattctcctgcctcagcctcctgtgtagctgcaggcacccaccaccatgtccggctaatttttgtatttttagtagagatggggtttcgccttgttggccaggctggtcttgaactcccgactttgggtgatccacccgcctcgggctcccaaagtgctaggattataggcatgggccaccgtgcccggccaggttgtattttaatataaacatttaatatacagattggtacatagttaatgttccctaaatgttatctgttattatttcagtaccatttagtgaataatcttatcctttccactaattttttttttttaattgagacagggtctcgccctgttccccaggctggagcgtagtggtgcagtcgtagcttgctatattctccaactcctgggcttgaggatcctcccacctacctatatcatatcctaaattcttttatttatttggatcaattactggttccctccaaacaaattggagggaaccagtaagatgttaacaactggagaagggagaattcagagaggtatgtgtttatatgccataaaggaacactgaaatgaacacacaaaaaaatgcagaaactgatctatcaacaaagtagttgcagtccaggcagatataactaatttgcattttaatggacaggaataattctgtattaatataagttttctgtaacttacaaagctgtaaaattgctcaaagatacgaaatgacagtgttaactgagacaggtgagctagacaggagactaatctttttttttttgctcacttcaaaatctttcacgatgttcccttcatttgcttgtctttttttttttttttttttttttgccctagtgcctgatttaattaatattagtttcataagacttttaaatatctggaagggcattttactcattaatcttattttttaagacagtaatttttcctggctgttctttcgttactaatttccagatgctcattagaaacactttcttaataaaatgattttaatgagtaaaattgtgaatgtgttaggtggggatagattaattttcttttaggtttattttagttaatatcatagaatttaagagctggaaggagacttccagttcatctcttccaacctctaattttatttctgtcattttaacgtggaaaatttcaaacatagactaagaagaaagtgtacttatactccatatgccatcccctggcttcagcagcttccccttcatcaccattcttctttcctccacagttccactcattcttatgccagttgccgtggactgaatcaaagctccaacatatttcatcagttactctaaaagataaggagttttcagacacaagtataatatgaagaaaacatctaaaataactaataataacatttattatcaaataaatagtattcagatttcccccattgtctaataatctttttcaagtttattttgttgaaacaccttacagataagggccaccttatctgtaacaccttacagataagggcaagtgattgacataactttactccagtgtataggttcccctttcctcttctttttttcctctttgctacttatttgttggagaaactgggttgtttttcctgtagacttttctagattttagattttgatgagtatgtcttcagggtggcacttaacatattcttctttaccttgcatttcctgtgaatgaaaattcgttccagaggcatattcagatttgggttagttttttttgtttattttttgcagtagtgtttcgctgttgatgatactactttcgtcaagaagcacatgaggcttggttgtctctgtgatattagcagtcattaatgatcacctagatccatgaattctttaggggttgcaaaatggtggcattttaacattattgttcattttttgtttattagcaggaatattttttaaagagaaactttccctaaccaattcttaggttctgtgaggtacactggatgaagaaaggcaggataagtgctcgattgttttccctcttgattaccaatcttcagaataatgagttggttttgtggcatcattcaaagatgaccagtgagttggtttgttttgttttattttcattatgaagccatagctgtaaaaccgcttgatttgttttcagtccgttaccgttgtaattctttctgatgtttaatgtgccactgctggccggtgggagcctcatcaagttgtttctgattccgaatttctgacatgaccctagtagcctgtaatagcgtctttgttgtctgctatgacaagatgtccagggttaccttttgcatgggctgtcccaggtctgttcttgaaggagcagtggtatctcacgataacaatctgggcagctacacctttaacaaaagaggttgatgaagctttgtgaaattgatggagttggtcaagactcgttttaacatggtactactaatctagacttctaatctagattttcccacttaactctttagcaaaagaaggctatgatataaaattaaagatccaagacattaaaaatatgagttgttttttgctatttattttgagatttcagaatactatattaatgtattacctttaaatctcttaattagaaaacagtaaatacacatttagaactaacaaggaagtaatttgtctttcttttgaagaatgttatctcttttttttttttttttttttttgtttgaggcagagtcttgctctgttgcccaggctacagtccagtggcgtgatcttggctcactgcaacctctgcctcctaggttgaaacgattctactgcctcagcctccctagtagctgggattacaggcacccaccaccaagcgtggctaatttttatatttttttttactagagacgggatttcaccatattgaccaggctgatcttgagctcttgacctcaagtgatcttctggcctcggcctcccaatgtgaagaatgttatctttatggactaactttataatctctgccacattttgtcaaatgatgggtactttaaaaatggggttcaaaatctatacaaaagttacatttaaaatttttgtatagactacttaatgctatgcagttggtactgggtagtttcttggtcatgcagtgtatttgataaattatttagtagctatgtgaagtagcattttcaaacagtactgtctttctaatctaccaagatattgcatagaagttcatatttacccagaaattatgcaagttcttaaagccagagttttttcaaccacagcattttacaggatttctgtggacaagaaattaatgtattttatgggatatttgtatctttaaagtggaatttgcatgctgggaatgctttaaaaagaaagtatttgcataaatgtcatgtacatagctagtaattttgaacatttattccactgttggaatgtctttttgcttgaataagaacttttctgactctttgctccaagaagacacataatgacacataatcttgcattcttgatggcagatgtctgctgttagtgaaaatgatgagtcgtgtacatatttcatacttctgttttgttcttcatagttttgtttttctctttgacttattacaagcacagactctttaaatttattgaaatattttattctcttacagttatttataacagttaaataatttctcttaaaatatgctaaaaagttatgttttcttttctttctaggaggcactggctacaattaggcttctcgacgtcctgtgcgaaatgactgtgaatactgagctgctcggctatctgcaggttttccctggcttgctggaaagagtgattggtgagtgaaatatcacacattgtatttttagctaagaaatctttggcttgtcatactgtaatataaatccaaatacaaatccttaattttcagtgtactttgggaattttgtgaatatatttttttgagaggaatcacagtgttgtaacagttcaggcaggccagataaacctgagcccatgtgtttgttcagccacttcccttctgttaactgaagattccttctcagtaatgtgaggataacaatgcctgttatgcatatagtagatgtttcatcaatataggatgtgatgaagaaggtggggcaggcaggtttgcgatgatgattgtggttttatattactatagctttgtaaaatgtggcagtaaatttttcccatttacatttagtgaacacatagaatggtgttttatacatattatatatacaaatcttatgagaaaaaggttttaaacaagaaaccattgttaaaagtattaccaaccttgctaaaaagctgtttgcaaaataattcaagtagaacctgttccttgtggctagccatgcttaggtttgctgttcattatttgcaattttttcctttaaaaagatgatacttactctggagaccagtgtcctgagaaagatgactttgtgtctagcagtatagatgagctagcagtcagctgtagaggaagatccttagaattcctcatcagtgttgtattttgagtacattgcttttagtgataatttaaataaaacaccacaaacctagcacacttgagtgattatggaaggagcctgagtttggagccagggtcgatgtgggttgccatcccagctctgccaggtgccaacttttctgagcctgttgttttcttcattataaaattgggaaagtgataccttcctgtataggtttgttgagagggttaaatgagataatgtggaaacactgaaatgcagttcctggaagattgtctgttttcattggctgcctggaggtgctcatagagtagagcagtggtaagttctttctcctgaatgtagctggagtgaagtatagagaacatatgctggcttctgatgatttggccagttggatgagggaaaaataagcactcttcttggtttctgtcatatgcatcattatggatagatattgtgttttagacttcattgactgaagttattagaaaagttctttcataaagaagttgagattggaaacctttttgtaagaaggatgctagcaaacttttagctaactttttttgtagataaatagaaactctgagttggggtagtcattatggcttatctccccaaaactagagtcaaaaaatttaaagcaaaggcagaagagccttctaatcattttttgaagcaaaggcagaagagccttgtaatcattatttaaataaagctttctgtgctctacctttagcctattacaataaattagatttgtctatggaaaactattagtacaacatactaaaagttacttttctgtggaaaatgaagtttactcttttggttatagatcttttgcgggtgattcatgtagctggaaaagaaaccacaaacatcttcagtaattgtggttgcgtgagagcagaaggtgacatctccaatgtggccaatgggtttaagtctcatctcattcgtctgattggaaatctgtgttacaagaataaagataaccaagacaaggtaagaggatttcttagtatgtattatacatgtatggcttcatttagaatatagtccttggaagacattcactcttttggagtgaaagcttgaggtgcttagaaagtagcttggatagagagatatatattttatatgaatacacacacacacacacacacacacacacacacacacacacatatatatacacacacacacgtgtgtgtgtgtgtgtatatatatatatgtatatgttaatatataggctctttggagcctagacaaatttctaacacacagtagatatttaataaacactagttattattgcctattatcttaaaaaacaaagcttagatctatatcctatgtttatggacgatagcatcataagccttttcttctagatgttttaaaatggatataaaaggaatataatatttaagtatgaagtctttgaggacctagtaggctgcttttagaaacctcttatgtgcagaagagcttaaaggtagttatattgagaatgtgagagaatggtaagaaagatctcagggcagttggaccacatgcttcagattgatctcgcctttctgtatttttctggagttttacttcgggtggcatttgatttgcttagttaaatattaattaaatttctgccagattatatttttctaagatggtggcagaatgtcttgcattgtacatgtgtgtctgcagtatgactttgccactcccctgtcgagggttggcatctatttctccatccacttgaatctgggcaggccctgtggctgctgtgagcaatcaaatatgtgatcctataccatttgtagcatagcccttaactggtctagctgattctatttctggcttcttagaagcccgtcactatgtaagaagtatagattcccagagatcaccttgctgcgagttgctgaatacacatggaaaagccctggaagataagatacaatgaggagagaggaaaggtctggtgaaggaacatcaaggcatgagatgtgtgcgagaaaccatcttgggagtagatccatcctcagtttcttacttgcccagctgatgccacatagatcagggcccccctactgggcatagtccttcctgaatttatgacccatagtattatgagaaaaagtaaaaaatagaaaaaaaaaataagggatataggtcctgcttcagttagtagcccagtcagttactgttggactgatccttcttcaaatagcaattataaactttggacaaaaaatagccatgtgaagacactcgaatttgacacaaacgggcagattctggagtgaaattgatgcttggaagaagggaatgacacagtgtgtggcatgcagggcagtgaaaagtcagttacaaaatcttccgtctttctagcttgaagaatcaaagaacagtttgagggcaaccatggcattggaaagtgaggggggaattgtggaaagtagaaaacagaccccaaactctgggtgtcagctacctaaatctctgctaatggctgaatcacacgtgtggggcaggctccaggcagctaagctaaggatgaagtcattgtattgagatttgagctcccaccctagagtttatagtattaagtccaacttacactgtagataattaataattgccctctaaaaaaaaaaatcaacactctttagaggaatataatataatccagaattgccacagcataatgtatcctgtaatgtccaggatacagtttacaattgcttgacgttcaggaaaatgtgacctgttctcaattgaaaagatgatcagcggagactgactgtgagaggacacagatactgggcttagcagacaaggattttaaagtaccaaatgtaaccgtgctcaaggatgtaaaggagatacgcttcataagagtgaaaaggtgggatatctcagcagagaaatagaaactataaaaaagaaccaaatggaaatcctagaactgaaaaatacagtatctaaaataaaaaaaaaaaaataccgaatgtgcttaacctcaagaaagatcacagaggaaagagccagtacactttaagatacatcagtagaaatcatctagtctgaaaaacaaaagcggggagaaagattgaaaataaaacggccgctttaggatgctaaatgttagggtaatttgttatgtagccgttgatagctggaataattcctgtgagacatggcgcagaaccaaacgctagacaacttgcacttttagtatatgggcgcaccattttggcaatcctcatcttcaggagagtgagactactgattccccccttgggaaattactggactgatttttgcaaaagaaagttgatagcgaataaagcactttacctttttaatgaccaggactgcctttcttgagcacaaaagaggtggtttttcttgtgtttaactattcttttgttgctaatttggactggcctcttataggaacaaaatgcagtaacccttaaaaggcttgcgaaataactcactgaagtcaggatcagattgcaccataagtaaatatggagtgtgcccaagtgctgctgtgcagaggtcactggggcgcacaggaagtcgatggtgtgtcctgtcacttgtgcagttgctaatagcactgctgatttctcagcaaacagtttagagggtatgaaggagttcattctttgagtatcaactcaaatgccctctgtttctctcagtttcttacgtgtgtcaacaaaaggcctgaacctgaaagcattacctctgggatttttttcctccttccaaagaccgacacaacgccgaaatcttgttctggatgtgctagagtgttctttattcttgtagccaaatccttgttccagctgggtgttacagatatttgccttgctcattgttgcctcaagggatggaattcactcgcactcagatgactttggttatagttttgggaaaatggaatggatggttatgtagcaggtctttatcacgggaccagtaattctcagtgttttgtcttgatggattgtctcacttctaacccagctagggctttaagggaaatttggctctgtctctgctccaagactaaagatctgagttgggagggatttcgtatcatctagcctaatttgggttcctcctttgcccagaagacaaaagggactgatgatttattgtttagtgtttactatgtccttgcattgtgcttagtgaattacatatattatcaactttaatctttgcatcagccttgcaaagcaggttctggtaaccacattttaaggagaggccatccagttaggtgcagagcccagggtagaatttggatttgtttgcctattgagttcccaggcctgtgctcacttcctgccccatggtgagaacttgccaaaaggttggagaaaagggtttaaaatagacttcctgcaggacttcaggctggaggctggtcagtctgcgtctcctaggccagccaggccccttagactccctcctggttgaagttgggagctcttgggggtcctcttatccttgtttctgattcacccattcatcaaatacgaatgtttgctggcttggggatcctttgacgggtaattcaggcaaggtattaatatcttctgtggagcttccattctggcatcatctggggaccatgcttgcctctttgaatcagaatctcaaaactactcatgacacagattttcctaaaatctttgtgtactgcctgattcctctgaattttgagcaagactctttcaagcccaactgtgtctgtgttgtctgtgtaacttcatccattgcagtgagtatggtgcccacctgctggatggccctcttacacttgtgtggcactttccattttccagagctcttttcatctgctttagtttgttggagccttatgatacctctgtggaaagggctgaaaagatatttccaccatcattttctaaatgaagaaaccaaggccccgagaccaagtgtgatttaactcagctagcacttgctgagtgagaattgccgtgtgctgcatgctctggagaagacagtcgctttagtggtggaatgacacatgtccactaggagctgtagcaaaagtccgtgtggtgaggcctgtcagaaaggaacaggggggtgatgtgtcctctgggctggctgtgccaggagcatttctctctaaggacaggcactggactgccaggagcatggtatcaactggaaggatggtcatctttctttgagatacttgtctttgggcaagatttaagagaatcaaggtacgttgcctcagattgaaaatctgcacagaaatgtattttatcccaaattctcatgagtctttaatgcttaagtctgtacacgtgatagatgtagtgtttcctgaattgtaaaggaattgctagacttccctttacctcgtcatggtagggaggtgtcaaatccttactgacttctattcttaccttgtttttttgttctcgacttgtgtagtatttccttgctacaactgtagtgattagtttacttctaaacttttgtggacctaaatggagattctgttttggtttctattgtaagaagcacaaagatactaatgctataaacatgaagaaagcattcttcagcttcttctttgttagaataaggaatgtatggtttacctttttcttccctattcttcttcttttcactattgtcataacctctttaagtgaatctttattagaagaaaaaccaaacgtttatttcataaagctaagtgcatttttcaaatcggacagacagatgatctagtttatctaccttccgcccgccaaggaaattgtattgactaggatgggccatatatccgttctgctaaaggttatggaactgctattcagtttcttctcctcctccttcctcctccctgatttaaaatattcccagcagtcacatacttgatgatcccatgtcaaatatatgtgcctataaatcttttactataagcataccttaattttaaagtaagtctgtactgtatgaaaaagttcaacatgtaaagacaaactttatttggccccttcagttctcaattttgaaggcaggttcatttatatacataaaataatctttgtaatacatttttcgttaactttgtgttgctcatcatgttactcccagcatctaaattgtacctggcacatagtaggcattcagtaaatttttctaatttttcttgaatgacaatttatttgtaaaataaattgaatgttgaatgtttactacatatcaagtgcacttttaggttctgaagatacacagcaagtaagacagttcttttcaaggagtgtaaatattactatacaattttctgactaaatttacaaagactagtaaaaatagataacttttcaaatgaaaattaatgttcctttaaattctgagttctgtatttttgaaagtctttttttatgtttgaatatattctaatttactgtaatttgccatcgttttatttgatccaaatcatatatattttagattataagaacatctgtattgtataatatttgcaagtaattaaaaaatattttttaaatcctaggtttaggcttcgtagatctgaatgcggttttttcattaatcttaaataaaatttaagactgaatttacagttgttaaacattcataacatgatcaatttttagtgggttttttggtggggtgtactattttccaccctttttgtatctagttgcaaggagccaagaacaggcaaattattaactcctttattatttcctcctgtctgaaatgttttcaagcagcgtatttgtctgttaaatcatgaaaaactgaaaaaaaaagtctatggctatttcctaatgattttatttaggttgttgctcttaatgaggattagtacctgttttgtacatcagtactggctgacttgtcagttactcggataattgatcgagtgattgctctgcagagaaataaataaatgcttaactaatatgtgttagtgtttttctttttgcaactgtaaaataggccggggtggcatggcccttggtgctcaggcagggccagcttctatattctcagcctatactagcactgtgtggacttcccaaccttcatactttccctgagtgaccttaacttggccttcagaactcaaggtcacaggtaccctgttgacctgtgcagaaacactttctcttctacgctcctcactatactcttctgccctctgctcaccccctgacttacactctacctataatcagtttctgtgggtaaataggttatgggttgttgattctgatgcatatttcagtatacgtgtgctgttgtttttggttttacttaataagtgtttagtgtgatacacatacgtaaactgatcaccagcagaactgtgacatatgaaacactttatttgggtatcactcaattttactgtagcagcctccatcccttcttagttataccaccgttaccaccacttttgtccttgctcctcccttgatgttttgtctttcatgaaacccatctcccaaggtctttctggatgataatggcttaattcactctctttcccagatacatgtttttccttctttataggaacctaactctgcctgtctaattggggaattccaggcagggtattgaaaatgtctggggggccgggtgcagtggctcaagcttgtaaacccagcaagcacattggaaggctgaggcgggagattgtttgagctcagaagttggagaccagccagacaacataataagactccatccctacaaaatatttaaaaattagctgagtatgttgatgcatgtttgtagtcccagctgtttgggagactaaggtaggaggattgcttgagcccaggaggtcgaggctgcagtgcaccgtgattgtgccactgtgttctagcctcggtgagggtgtgagaccctgtttaaaaaaaaagaaacagaaaatgtctgagcagtgggttctcctgtcactgacttttctgtcattgcttggcttgtaacattggatccacgtgtgtgctgtttatagaggaaccttacaacaggcagagagcttatgagactttagagttcagtaaactcagagttgcctcttagttgaccatctattaactgtttaaatttggacaagtgtctcaacctttctgaatctcagcttcttcatgtataaaataggggcagttacacctccttgtggggttgggaggattaaatgtgatcatgtataggaagtatctcatgtctgtaatcctagtactttcggaagccgaggcaggaggatcacttgagcccaggagtttgagagcagcctgggcaacatagtaagacctcccatctctaaaaaaataaaataaatagccggtatttccagttacttggtggggccaaggcaggaggatcgcttgagcccaggagtttgagaccagcctgggcaacgtaataagaccgtttctctaaaaaaattaaaaaattagccagtgctcccaggtgcttggggggctgaggtgggacggttgattgagctcagtaggtcgaggctacagggagccgtgatcgtgccactgcactctagcctgggcaacagagcgagactctgtctttaaaaaaaaaaaaaagtatataatggattgccttatgtctctaactataatacttccgtgtccctcctcttaccctccctaccagtccctttggaattgaaaagatctagttcattccagtgtctccccattatatgtatttacatagaaatttgtagacaacatttcacaaggatttgcaaagttcaaagtaaacctcatattctgcattctgtgtgtattactttttctaatagatggggctttatggaggaagtaaaatgaaaacaaatatgagaactttctttaggatgagagtaattttgattcttgtcataaatgttttctgacttgaatttctcttatgttattatctagtaaagagctgaagtgttttccgcgtgaattccaaaatctgttctagctcaattctgaaagtatgttaaggaacttttaaattacagggcatatgtcttacctcaattggattgtgcgtttttcctgtgtttttcctcttgtcagaagcaagttgcaccaaatctcagcttattgatttgaagattgaatgtataggcaagatctggcttgcttagaattccacttctttgtaatgtaatcccagatcaagaaatatgtcaaaattcataaatcaaactgtcaccattagttccctgaacttacagttcctgtaacagtaaatgaaattaaaattcctatctagaggaaacctatcatggtttaggttgttgcagctgtaaaattttttttaaaagactaaaggatggtctaccatttgactccaaaaaccccttttctatgtcttgttctacaataattgacttattctcttccaggaaatgcataacattatttaaaaagaagaatgatactaattatataattgcaatgtaacagcgtactattgtcgataaccattactattgcaaactaactaggctccaggcccttgacctgtgcttcatcgtggaattcctaccactgcatattcctccctaggctttaagcgtgaaggcagacacatcatatttggcttaacacctgccgtaacactgggtacatagtgtagtgaaattaatggacgctggatgactttgcttgctttactggtgagtcaagcgtagagtagttacttgcttggagcgatagcaggccaaattctgactccagagcccatacttttcctgttaccatccactgcttccaccgtcaccacaaaagaagatgtttgagactggtcctttgaaatctatgaccaaatttgtgtgactctttgaggtggcaggacattgtattacagctttttccacaattcttactgaacttttttcattatcatctaatgtctagtgttttagtaaatgtagtttcttttttctttccctttctttttttcttttttaagaggtggggtcttgctctgttgctcaggctggagtgcagtggtgtgattatagctcattttagccttgagctcatgggctcaggcagttctcctacctcagcctcccacataactgggactgcaggcatgtgccaccatgcccgactactaaaaatttttttttggtagaaaaacagggtcttactgtgttgcccaggctggtctcaaactcctggcctcaggcagtcctccttccttgacctcccaaagtgctcggattacaggtttgagtcaccttacctggcctgaatatggtttctttaaggttcatgttgagggctacatttcaggcacatgcgtatttccgagaagcataatttaccccatactgtagacacagaaagggagacattggggaagtaatgtgctgcccatgatgattccgcagtttgtaaaagtcatgaatccagttttcctaactgctactcagttttctttacttacgccatatgatcaatttttagataacagacgttttaatttaatttaattttatttttgagacagggtcttgcttttgtcacccaggctggagtgcagtggtgtgatcacagctcaccgcagttctgtgctcaagtgatcctcccgcctcagccacccaagtagctggtactagaggtatgtcaccacacctggcaaatttttgtatttttttttgtagaggtgggattttcccatgttccccaggctggtcttgaactcctgagcttgagcagtctgtccaccttggcctcccaaagtgctaggattacaggtgtgagtcaccacgcccggccgacaacagtgattttaaatggatttgtgtttaacagtaaaaaacaattatttcacagtatccaaaaagaagaatatctgagacttgggtgaggggaaaaccagctgtataaactgagagctgtaccttgttcctgtatggaagtatggaatatgggaaagatattagttatttttaaactgatttttattactagaccaattaaaatcccactgtgaaaaataagccataattttgactataaaatgaaaataattgaggaattgtcatatcaatattaaaatatactttaaggctaaaataatcaaaacaatttacaaaagtttataggttagtggaggcagacatagtttccaaacagacccaggagaagttatacgaatttaccatgtgataaggataatccagcaacccggggagaaaaggaaagcttattacaaaagcttgtaaaaaagcttatgtaaagagtttttctccatgataagaagagaacatgctccgttcattagtgattgtagtaattctttctttcttctactttcctgtttttttttgagacagagtcttgctttgttgcccaggctggagtgcagtggtgtgatctcagctcactgcaacctctgcctcctgagtttgagtgattctcctgcctcagcctcctgagtagctgggattacaggcatgtgccaccatgcctggctaattattgtatttttagtagagacggggtttcaccatgttgcccaggctggtcttgaattcctgacctcaagtgatctgcctgcagcggcctcccaaagtgctgggattacaggtgtgagccaccatgcccagcctctttgttcttcttttatactttgtacacctcttaacccttctttggccaagatctgggggctttagcaatgacaatttcaattatactttcagttgaaagatttttaaaagtaaaacgttagcattggatctggagaattttgctaactgagataattaatagctgggctggtggtgatagggtttgtgtgtttttgagagagagagagagagagagaggaagagacagacagagatggaaatataaagatcattcttccactgttatatgtgttttttcccctttaaaggaataggcatttgaatttcctctctgttgtcaggtgttctgacttgggtacatcagctcttactgagtgcttgaatgttcaggatttctatgacatatctcaatctaatgaaaatctgactgtgaaatgtctatatatctccccaggcttcgttttcttggttaaatgagaaaagtgctcttatttcaaatgttggaaagtagctctacctttttctggaaaaaaaaaaaaaataaaaaaaaaataataataataataataataataagatgggaaatgtctgtcccacatctaaagcagttttgatctttagcatatttagtttttttttttttttttttcctggcagcagctgaaaattaagaggatcaaagttatgttcctataaaagacttttttcctgtcagtgcttgaaggcattgtctgactccccccacccccacgttttaaaagctgattgcttatcttattcaggtagaatttaatttcatgcccatcatattctaatagaacaaaaatgatacttagtttcagactgtggattttagtttgaattcaaacctactgctatattgcagttaaagttgggaatattttttactccaaatagaaatgaacgtgctattttggcatagtggtaagagcttgtagttcaattcaacaagtatgtgtttgccatatgctgtgtaccagccagtattctagacactgggaatgcagaaatggatttggcctactgttctctcgaggaattcacagtgtaaagaaggagacagatgtagaaactatcatctcagtatcatagaataagtggtgtgtgacaggattgagagccagtagaaaagtacctaagtgcttggtataaatggctctacttggaacttcaggaagaacctcctggatccaggccttgaaggatgaatgagaaagagttaggcagttagaggagtaggtcagccttgcaggcagtgggtgagcaggtgtgtgggacagtgcaggacccagtggcacctgaggggttggggttggggttggggttggggttggggctggggctggggctggggctggggctgtgccagagagctggccccttggctgcacgatgggctctgcactcactgtgggaactaagggttaggccattttcagcgttagtagattccttattgtagctctcatttctgaggattattttgtggttctttttcagatccacttcttttttttttttgagacggagttttgctcttgttgccaaggctggagtgcaatggtgcgatctcgacgcaacctccgcctcccaggttcaagtgattctcctgcgtcagcctcccgagtagctgggattacaggcatgcgccaccatgcccagctaatttttgtatttttagtagaggtggggttttcccatgttggtcagggtggtcttgaactcccgacctcaggtaatctgcccacctcggcctcccaaagtgctgggattacaggcgtaagctaccgtgcccggctgatcaacttattttttattgtgttgtccatcttcgtcttgagtcatttaagacacttattttctcttggagattgtttttatttctagtttttagggtatggtttttctcatttgttctctctcatttccctcttcccttaacccctcccctcctcctctccacccgcggtttcttttcccagtgattttttttttctgtcttttaacttgatctcatcttcttaggagaaacctttttcggcagaagtcccataggtcctggctgtggacttgtattcacagagcgatttgcttttgttttcatctcctcgggtcctagagggtccactcacctcttaccagcttttttttttttttttttttttttttttttttttttttttttttttttgagacagagtctcgctcttgcccaggctggagtgctatggtgtgatctgagctcactgcaacctccgcctcccgggattaagcgattctcttgcctccgccttcctagtagctgggattacaggtgtgcaccaccatgcccagctaattctttgtatttttagtagagatgcggtttcactatgttggccaggctggtctcgaactcctgacttcaggcaatccacccgccccagcctcccaaagtgctgggattacaggtgtgagccactgcgcccatctcagtttttatattaatataatttcttgacttgggattctagtaccacactgacaatgtgactctggatgcagtagctgcctgtgataatggtcttccctggtcccccactgagatgtcgaagcaacccaaaacctttttaactgctacacagagattttgatgatgtggcagcctgtgatggggtcccatcctagactagagtttttcattctttgtctctgccctttgtaagccaaaagccacctacttgtttgcagtcctgaaaactctagcctccaggaaccttgtcctagttggatcctgcatgcctccactcttgtctgcctctctgggttttatttctggcctctgagaatgatgctcacactgcccagtggcaggacgcaacctgggttcctgagccttatggggttaagtgcaaaagtgagtcctgtcagctaagcaggagctgctgagagacgacccacggaggtgggctccagcagcttggcacgtgtaccttcgtggtgcatgggaaattttgattcaggtgaaaaaacagtttaaattctaggatattcttgctttctacccaggcaacacctcacatgttgacttaacttgtgagtctccctttcttcatctgtaaagtagagatgattttacttccctcatacatttattgtgaggattaaattactattgatgacagcagtcacagtgaccttccatgaatgcctcctgcatgtgcttgagtgggatgtttcagaggtgtgttttgttttatctcatcctcttcagagcctgtgcttactgtgtcattctgcctctctaagttaaatgtgcaggaaaggcttcctcaaagccactcagtggtgggagtgctgtctcagtagtcccgcaagcctgtaatcccagcactttgggaggccgaggccagcggatcacctgaggtcaggagttcgagaccagtctgaccaacatggtgaaaccccgactctactaaaaatacaaaaaaattagccagatatggtggctcatgcctgtagtcccagctacttgggaggctgaggcaggaggatcgcttgaactctggaggcagaggttgcagtgagctgagatcgtgccactgcactccagcctgggcaacagagtgagactctgtctcaaaaaatgtcttggccctccttgcaacaggctcttgggcaggcagccaccatgaaggggtgccaagagtatgagaagcatgaggtccatgcctgttccttctctgcctgtgagctgcgagaccgtccctcaacacacaggactgactggctgtctctcacaagccagcatcctggtgctcaggaaagccaggtggcagggcatggggaaggagtaccacctgtggccctgtgctggtcacatgtgtggccctcagaggaaatctccaaccctccaaacgcttgttcaggacttcctgtgcctgcacagtgcttgtaaatcctgcagcagtggcccattcagatagtcagaggtgtggcctgatttctccatgaccctctatccttccgatattttcatcgtgataggaattccacttttaacttttcatttcctttagttcagatctatgtcaaaatgcaaacacaccttggaggggaaatgttttaagccctcatccttcttttacatacttgtatggatgtatttctaatcataacaaactctgattagggggcctcaagagaccaaggaggagcaagaagaggtgtgaaggttctctggccgttctgccttctcactgcctcccaggctctgctcctttccccttccctcctcctggccgcactaagttctggggttggttactgtcatcaatatcttgttggtgtttttcatgctactaatagtaataatttgtgtatatttggaagtacccctgtgtcttttgggggaaaggtattattaacttggtttcttctatagattggaaaaataaaattttgaaccttattcaagaccctgaaaaagtaaactgtttccaaaatgaataataatgaccagagtcaacagtagtgcaggggagcattttatagtgctcactgtgtgtcaggtactcttctgagcccttaaatatatcagtgcgttcatcctcatgatatttcctagatgggaacatattatccccatcatagaaatctgtgaactgagccacatcagggttcaatagcttgcctgaggtcacacacagccaatcaagggtgcaaccgcataagaacccaggtggcctggccccagacccatgctctgcaccactacatagccacccacccacctcctccttctgccatgtttggcacagacttggccttggccaagtctctgagagaggtgaccactgggcatgccattagccagagttttccatgttatcgtaaattaagtttaaaatggaattctctttgtttacctagactttttttttttttaaagagacaaggttgtgctttctcacccaggctggagtgcagtggtgtgaacgggctcactgtagccttaaactcctgggctcaagggatcctcccacctcaatctcctgagtagcttggactacaggtgtccaccaccatgcctggctaatgtttaaattttttgtagagatgaggtcttgctgtgttgcctaggctaatctcgagcccctgggctcgagtgatcttcctgccttgcctcccaaagcattggaattataggcatgagccaccacactcggccccagaccctttttaagtaatcaatattctgtgtacaggcttgaaagactgacatttccaaaaagatatatttattagaggaaattgtgtaccaactttaagcaagagaatatgtatgctttaatcatttgagaaaaatgaactattgcttgaaaagaaaagagctaaatatgttgaacttttcccagtccagctgaaactgcccttcagagtttactgtggggtggggatgggggttgtgattgtccttttcaggttgaactttttgtattattgtacatcttatgttacaaatccttctacaagctgcacttagctcatattactctcagacattgaataattggtttaatgtgagactactttctgggaatgattcattggtatttatttgacatgttttagtgataatattgaatatatccactggaaaaatccaagaggaacctttaaatgaaatcatttccatggcagagttgggggcaagagagggagttggagttgatttctcatcgtgtgaatcccactccatcagcacgtggaaactgaggaagagggaaggagtggagaagaaccagacgagagacacggttccagatgctttcccaagtggctgtgccctcctcctatttgcggaggaatggctttggtctgcacctgcagctctggacggactgcctggggctggggctgtggaggcggacgactggggagtctgatggggaggtgggtggcgggggtgttgacaggaaaaatccgactggcggccttggagcagttcgaagagagggcgtgtcctttgcctgttggaattccaaccctggcgactttcagctacaccctcctccctcccctagccccacacaaaacaaaaatgcctcagagcttcagtgtaactggagcaataccagctgattctaacagtgtggcccagcagcgcctgctggctgggagcagggacagaaaatgcctgaggctccgaggtgggagcccaggctgggattcaggatttcgctgctccccgttcaaggcctctggagaatgttccaaagggaggtgtggatgtttcattcagtactttggagggagaaagaaatgggttctttctctgtattctctaagatagatttgttcttaatcttgaaaaatcatttctagccattttagaaaaaaaaaaacattagtacagtattagtaaatatggatgggataaaattttttttacatacacataggattcaatacatttttcatatgctgaccttataagtcatattgttttgaaattatatttattaaaaatgtgattagagttatattcattcatgtttgattctcttttaagaattattctctattagtacttttcttacatgattcaacttggacttattagagaaataaactctggcacactttctccagtcatattcgttgagcctgtatttataaaattggcatttattggacctctgctgtggatactatttacttcttttgaaatttgtaaaagaagaaaaaaagttgagcttttgtgatgacacacaaattcaaactaaatttgatgcttccaaagtatatggcagagacggatgcaactattcgttaccagaacagtggcgtcaggaagccccgtgcagtgggtaggggacacctggtgctgcctccacaccctgcccctgccagcccctgttgtcctgagcttccgcagctcccgcctgacgtttggctcagagtcgtccacactgctcgtgtccctcggctgtggagcagggccacagtctccctgcagggttgtttggagttagctgagccagcgtgtggaaagcataggtacttgacagaccaccagtgcctccatggagcaccaccattgttaactgcaggcttctctagccatttagaatacatatgaagactcagaaaaaccagttttacttttaggaaattacatattcatggcttgagctatagccactgactttgtgcttggaacaaaatacataattctttttggttcaaaagattagattcaaattattggtcatcagaaactgaagtttcctaaggcatatcacacgtaattcaaggttgctttgatgtgttattctgctaatccacaaccatggaagttcctggttagtgcaatgtttcatgctctgacagctatctttaagatgttgtttttgggttgccaggtgttcatttaaacacactggccatgtgtttgcacacgcacatgtgcatacacatagccactgcggagcgccaggagctgtaactgaacgtggacttgatagagcagtatgcgatgtttttgtcttcagggcaagctcttgatgcatagcttcatgtgacatctcgtttataacagcctgaggcatcagtaatctttatagcaagaattctagtgctgtgttatgcataccaagcttaccgtttattctgcccagtaaatacatggcttttatggagtcataaatcatgacagtaggagtcatacctctccaaaaaagaagagatttaaatctttagagttaacaagatttaatgtaatttagacattattcttacttagaagtaccattcttatttaaaggcagtatatctcatatctttaaagataactttagaaacttactgccagagaaacaaatattgattaagagcacactgtgtgccaagcattatgcgaggtgctggagagaaggaaggggaagaaaaggtcctcaccctcaagtaacttgaagcttagagggacaatgataaatagtaaaagattctagagtccgggcatggtggttcacacctgtaatcccaacactttgggaggctgaggtgggcggatcacctgaggtcaggagttcaagaccagcctggctaacatggtgaaaccctgtctctactaaaaatacaaaaagtagccgggcgtggtggcgcatgcctgtaatcccagctactcgggaggctgaggcgggagaatcacctgaactcgggaggcagaggttgcagtgagccgagatagcatcactgcactccagcctgggcagagcaagactccgtgtcaaacaaacaaacaaaaaagattctagagcagtctgatcagggtgagggttccgtactcttcttgtgccatgaagcaggaggaaaggcctcctgagggagctgaggctgcacgaggatgagcaaggtttcataatgtcctccagaggccagtttaccaagctgcatcagctcctccctcccagccaccctgcccttcataaagctctagttttgtaggggatggggtgggatggggtcacacctcagctgccggcatgagctaagggaccatataacagtcagcactgtccatcgcttgcttctctctctttctaatttacatacagctaaacacagatttttaatgaatggctgataagttttgacagatgtctgcacctgtgtaattatcaccccagtcaaggtacagagagcacctctatcccctcagaaagttttttccatgctggctgttgtgtgccagtgtgccaggagagcatggggcaggggaatgatggccctaagaaaggaaggaggaacagggggaatcttgaattacattctttccccacgtggagatagatttgtgctaattccacaacgtggaacatcctccttcgtttgcttagacttccctgggagcagtagcccatgtactggtggcctagctcaactgtggcttggttctgggcctgtaaagccatctttcccacctacagatgacattccctatcttcatcatgtgcttttagtcaggtttcctgcgggccagatgcatctgagagtgtgccctcattaatatgggactctgtgtatgtccagcacatgtggggtttattcacgtaccagtgattattattcaacatcgttccctttagtgcagcaagcactttctgagtgcttaccatgtgccactttctgtgaacctctgcagttcaacagtggagtcagaggcagtccttgttctcaagtagctcatgatctactgtgggagacagatggctagatgatagggtgtagtcatatcccattatttctgataccccaaatcttgatcagaagccttgatcagaagctaggaaggcttctgatcaagatttgtggtgtcaagaataacaacgattacagcaatagtagttgcttattgagtgtgtcctgtgtcctaggcacagttctgagtattcgtctcttacctcatttaatgatgatacctctcccatgttgcagatgaggagactgagggccagaatggttcagtagtgtacccaaggccacacagctgttaagtggcatgagaaagaaagaaactttcattttaagcctcttagatttttgtggattgtttgttactgcagcacgaaccagcccatcctcactgataagagccccagtgtgcggagtggattcctgagccagttaaaaggttgctacagcagtggaggcctggttggagggtggtgataagcctggaaataaaaggacatatgtgagagacagtaatttgataaagagtaatgaaagaggaagctttctttcaggtagcttattctgtttcattattgttgttttccttttgggaaagaagttgaattttcattgttggcttatgttttcaagggtgacctcagtattttattttattttatttttttgagacggagtcttgctctgtcgccaggttggaatgcagtggcgtgatttcggctcactgcaacctccacctcccaggttcaggcgattccccagcctcagcctcccaagtagctgggactttaatgtttttatattggtgattttgagcagagactgtattaccatctaaaacactacaagcctagcatgtaagctccatgtctgtttgctcctcattctctccagggcccctggcacagttccgggcccacagtgagtgctctgtaaacttttagggatgaacaaatgaatatttttaaatctgttcattgttttcacagttaaacttttctaagcacttatgtaatactgtgtttacttaattttcatttctcaccaacctttatggaagactaggtgataactggttaaattgtaatacagtatcataggtataatctcgaaaaggtaaaaatcaaatgtaacgaagcattataatccagtgactggaacattttatgcaagcctttgctctttatttatctatttttttatcatacacttcttcccagtttttgcttagtccttgttagcagttacattaaaatctgttttaagttccacctcagggaatatcaaaagttggttacttttctaaatgggcctttaattaaaattttaaaaaattagaccattgtgttagattttttaaaatgttggctaaaacagaaaaggttgatttcagtgcagttgggctgaaactatacttaaatagattaaagtataatctggcttttaaaaaaaacacatctgactgggatgaagtagttgtggtcttaactgaagcaggtgaatggaccatattcgcctttaagagccttctgactcccaggttttctgatttttaaaaacttcctatttagtcatatgtttttacttcactttatggtttaagtgagccaaccaacaaaagttactcataaaagatagtattttacttgtaacaattgcagaaaaagtgaaaagcttgacattacaggtagaaaggaagtcagtctctgtcccctgtgcgtttccgagactgtgtttctatttatttgccctttgtctgtttcccctgaccagcgtgcgtttctttctggaggcgcagggacctcggcttatttttctctgtctttgcattgcttgacagagggcctgacccagggtaggcactcccgcttcatgactacatctcattttttatttatctttgttatgatagatagcagataaagcagttgatttcagtcagaagcagaccacagcagcaggattctttccacggtgcatgttctggctgagtgttggtgggctccaccctagccgaacctgtgtctgcacacctgttgtgtcttcctgggaggctcccaggcatgctcctgtctggccagggtgcttcctcctcgctctccagctggctgaagggaagctgggcaagagtgtatgtgtttaggccacagggagagcacagactcccagagcatgaaccaaggggcttccaggcctcagggactgcctcctggtcccccagaggccacctcactcttactcctgtctccaggctggtgacctcacatggccccagccatctctccacatcctcccctccctgctgtggagcccccactgacagatgccttccccctgtgttttggctccaaattccaagtgagagtaattgcgtggcttcccttgggtctgtctccatccctgttgtagtccctcacagcccagactgtggactgcagaggcatcacctaggggcttgtctgagatgcagagtctcaggctctaccccagcatccggaatcagaccatcctcaggggattggaatgcacagaagcatttaagaagcgctttgtaaagccatggcctctcctgcgcaaagaactgcgtggtcccttttcctggagtaggaggctgtggctacagcattttcatctggaaggaggcctaggaaatgatgtttctgtggccttcctaccccctctccctcaccctggtgactctcagttggggagggctgccgggcagtgttctgggggcagggaggtggtgggagaatctggagagctggagagagtgaggtggtgaggtgggcctggcgtgttcaaggcagagaaggaaggaacgagggaactggctggagagacttggagggctcctcagagatgaggctgagtgggagtgaaggtttcgtcaaggttacgaaaggcctttgagttcaagctgaggcctttggacttggcccctcgctcgctttgccaggagacaggcggctccttgcctgagcctctgtgcttgcgctcctctccccagccccaggtctgcagagtgtgtggctgctgcaccctcaggtgtttgctcatctcctcacaggtctttcctgccccctacctgttaaaagtcggaccccaccacgccccccacctctctgtccctgctctttgggcccttccttttccccaggttgggctcttgcctttttctctgttccttcactgccacaggtcagactgtcttcatatgcatgcatttacaggcacatttgtggttggttttgtctgctctgctcttcgcaaccctagaatgtaagtacaaggaggataggcagggaccatttgtctcttcaccattctggtgctgggaacagcatagcatggtggtggagtgggctcactgagtgagctggtgagcatgggctgtcttgaggtgccggctgtgttaggctcttacccccacctcccccagtgtcttccaggcccccttcttatctaaggctgctacgtgttattggagaaaattataatacctgacttgtgagttccattccagaattcggccagccagtttctccccggcctctccggcagcctctctgcttctccctgatcctgcagcgtgtgcttgaaatccttcctcacggtgcacactcatcttcaatactgcagcatctgaccctgacttcatacgcttgcttgctaagtccacattctctgcaggaatcatcttctccctcccccatcgcaggggagttccctctctgcagggttagatccaccgctaccccccagcccccacccccactcccactcaggcaagccttgttgccccaggcccagacctctcagattccctcctgtcacactgccttcctgctcagcattaccagggctcctggtaagtttccgtggaagggtttcccttagcaaggcttctgttctataaaatgtttacaactcccctcccttccccatgagtttgagtctcaactctcaaaagacatctcccttgcgtctggctaatccgggtttgtttggcctcatcctttcagacttcagaatccaactcgctcttcatgagcctttgtcttttaccagtggtagtttcgttgactttttaccccatcatcctttgtgggtagattgaagctaagatagagttttctcttttttggtatcaaacccttgcatgctttggtgaagtggagcaaagcaaaatttgaacacccaaagaatttattcagaacggtgtaaaatgagactctctggatggaacaaataacaacattcgtaaaccacgtgtatatttagtaagctgcggagttattggaaattcacaggcgcttctgctccacacacattctgttgaattctcagcatcagacagctaggatgtcagtgctgtctgctagtgtccttgtgactgtggggacatttgtctgttttaaattgttgtgaggtttttattctgaaccttttcacatcttcagtatatgctcttcatttttcaatcagttaattcccaacagtcattgtcaccagtaatcttatattttacagtttaaaggattatatgataaactttccattttataaatggtaaaaatccctttcaggatttctggtgaagcacgtttgaagaaacatactggttggaaagcagcgtgaagtatgcccctgtggaaacactaccgggagccaaggagattgccctctcatcgcggggccagtcctagaagccacttcttccccaaggcaatggcaggaggaaagatttgacttagtgtggggatgataaagatcaggaggttgcagcacatcatcataggaagatacagagaggctgtgaggagcaagacaagtctgaaagccaccaagagggagacagtactagggagacttggcagggtttgtagtaaagcgaaactttgccagtcattagaaattagtttagaggcattaaaatgctgcccaaatcttggaagataaacttgtgctctggtgaattattcctctctctctccctaattcctaattgcaagaagttgctctagaatcagctgggactgaggggttgattgtggtggatttgctcccctcctccacctgcaccttggcattacctaagttcccccttattgggtgctcatatctttagtgcaaatattttaaaagcccctccatgtcataaatcactcctcaaatataaagtacttcctgaaaattgcaaatcttactcttgctgttcaaaatattggttgttctcatgaagaccctactgagatggaagcagcctacctgaaaattgtccctattcgtaccatgtgcttaggtaaaaagactcaatttcattcagatggcatttctccttacattaatttacaaatttaatatgatcccagtaataccctcaggttttttttgagctagattgattctaaatttatttagataaataaatgagcagtaatagccaggaaattccctgaaaaagaaaaataacagctagttctaccagatactaaaaatgttatacagcttccactgttcaaaacaacctggcattggcacgtgaaggggctgacaggctaatggggcacagtagaaaaatgcagaaatagattcaaatgtttttggaaatgtagtgtatgataaagctggcatctcagatcactgggaggaaaagaaggaatatttaataaaaagtatggggacaaggatatccgctacctttagatcaggggttccccaatccctggtccgtggactggtactggtccatggcctgttaggaaccaggccacacagctgagctctgcctctagtcaggtcagaggtggcattagagtctcacaggagcgtgaatactgttgtgaactgtgcatgcgagggatctaggttgcaagctgtctatgagaatctaatgcctaatgatctgaggtggaacagtttcatcctgaagtcttccccgcaacccctcttcccccgagtctgtggaaaaattgccttccatgaaatcagtccctggtgccaaaatggttgggaactcctcctttagataaaactggatacatcccttataacatagacatcagtttgaataaactgtaaatggcacaggtgtaaatgtaacagcacctgaacccatgcaagtattaggagaaaacatgaatgagttccgttatataacctccgagtctggaagcaataagagaaaaggttgataaatttaagtacatttttaaaaagttggatgacaagaagcaaataagcacataaaatgataaagaaaaaatagtggaaaagatttgcaacttaaatcacaaacagaaagcctaatatccataatacaaagagtttccaaaaataaaggaaaaaaccaatagccctacagaaaaatggataaaagatatgaatagacagtttacagaaaaacgcaaaggtgaaacagtgctcaactttgctcataaaaagaaaaatgcacattaaactactcactgagataccatttttcacctgtgtgatatcaaatgtagttggcaagaccatagggcaacaaatattctcttgctgtggtggaaatgcaaaatggagccgtcttcgtagataggaatttggtagttctggtaaaattcatatgcatttgctttttgactcagcagtcttgcttttaggactctatactagaaactagttcaagaccattaattgcaacattatttcttattccaaggagttagaaacaaaccaggtgtccatcaggaggggatttctggtatgtccatgtaatgaaatacaatgcattgtaaaaatgaatgaagtagacctgtatatattctgcagagtgatctgagtgatgtattattatgtggaaatagcaatcgcaaaacatttttatagtatactatatcttttatgtaatacagagggagaaatatgaatatatgtacatattcatatatttatatacacatatgtatataaatatacatacacacacacacacacaccacacattttttctatataatttaaaaaagaaaccatggaagaataaactaaaaactcattttaaacatggttagctttaagaggagaggccagggtggaatagacagggatagaaactaaaattctttgagtgtgcctgttttatagaattactttgaaatcaggtatatgttttacttaattaaaaattaaaaaggaaatacaaatacaatctcttgaaagaaagaaaaaaaagggagagggttggaggaaggaagaaggagaaaaggaaggaaggaatctatgtatatctcacagagaggatatttgaactgattttaaaacatcgtattttgacaatgtaattctagtggggtatagcctaggaacagaagagccacagagaaattataaactgcattctgttagtagcaacgttggtattgttactctgaaatacttacactgtgtgtatgtgtacacactgttttatatgtgtgtgctacatactttattttagaatagagaaaactgattatgttaaagctgttagacagcaagaatttcagcataatagagatacaaagataaaagcaaagaggtgaagtttaaaacccttaaagtttgagttggaaatagcagtatgaaatcatggttagtatttttctttccagaaagtgcctatttcctacccttattcactgaaaagaactaaaatcgttgagccctggtatcatccaaattgtgctttcttaataccatttttctctataaggaaccagggctccttggagatatggctggttttaggtggggcaggaaatggggaaggtggacctcggacatatagatgtacaagaaagttgccaaagtccccctgcagctatgtcacaaggacacaagacccttaaagtgttgtccattgtccaaagcagggatggtttgaggatgaaaaaaaaaaatgcagtggattgaaacacatagaaaacacaactggtttgtgtaaaaaacacaaaaatcccatagttcgtaatgatgctaagaatgtatgcagtaagtataataccacgtgtgaagttttcttgctaaaacaaattaattgcaaccaaatcaaacctctagatctaactgtcagtttagagaaaatacaggcatgagagagaagggcatgttaaagaaaacgtagtcaccaaatccagagggcattaaaaagaatttacaagacaaacagccagcttgctcagtgacagatggcttgaaaggagtggggaggaacatacctttacagattaaaactatttaggaggcacagcaagcagatgctctgtgttgactttgttggagtgctgatttgaacaaaccagttgtaaaggacatttttgagatgttcatggagagatgtccatggatatttgaacgtggactggctcttaggtaatattaagaaattgtaattaatctttctaggcaaaacaatggcaatctggttatttttgttaaggtgctgtctgttagaaataccaaggtattagctggtgaaatgagttgctgagatttattttaaatactcttggtgggaaaaagtgtgggaagaagacagatgaaacaagttgacaacatggtggtttctgaagccgaatgttgggtgtgtgagtatgtattatacctccctctctctgtactttgtggtgtgtttggaaattttcatttaaaaaaatggttaaaaatttttaaagagttgttattgttgttgacccgaggttgagagctcttggtgggtaggggactcatcatggaatctgaaaggcagctttatcaaaagagtaacgtgtgcagatgggcgccgttcatcccctctcccccatacagacacatttttgttgttatattcatagacacaacagacatttctacaggatc

SEQ ID NO: 333 - DNA, 37322 bp, Homo sapiens
gatctataaatgtgaaaaagaagtggctgtagaccttggtgggtttcatttcagtggtggggtgggggaacaaagcgccattagatgagcaatgaggactgaggtggaggaatgtgagttgagtattgagaattcttcatagaactttggttacaatggagagaatatatgtaaagagaaccgtaactgtggatgtagagaggggtccagggtattaaattatgttttaaaattatcaatgataagagaccctttcaggttgaatattaagaggaaggggccatctctttttagatctacaaactgaattcaccacgcccctatttccacactttacttccttgtttctattctggggaagcctaaaacttcacaaaagggatcgtgtagagtttggccttaatgtctattaactgcaaggatggatggatggatggatggatggatggatggatggatggatggatgcaagatgtgtcaaacagctgctggtaatttatggtattttatctctcaggacagagttctcacacaagtgactgaatctgtggcattggtggctgagagcaggcaatttttcaggtctctgcaagatgggagcacccagcttcagtgttcagaagcagatttaggccgacttccgtaccttacatcctggagggatccaccctgacttgagcaggtgaggtcacagacaggcttgctttccacaatggggaaaagattacagcctgctcagaagcgtgttgtggtccagctcctgtgtcattcaaaaagactccataaagtgcagatccagatcctctccaaacttgaactcaaccaatgtcatggagagacattcttaatccccttctatgaaaacagtgtcattagaagcacccagaggccacacacacaccctggaaatgtaatgccagcagtagctctagaacctgcagactcaagtgcctgttgctcattgtttttaggctacatgtgaaaatggaccattttgcaataaaaacataatgcaatgatgattattagagcattttgtatactagggatttttttaagttatctgaacatcaaattaaatataatgacaatgaaagaatttccacctgtcatatcatcaaagtataaaaagaaaccattcaggattccagtaaggtgggcacatgcagggaagtctaccctgtttcatattggtggtggggatgtcatttagtacaacctctttccaggttgatttggtaatttctattaaagactctatgcatccccgatctgcatgtgtttagggcctgctccttcaagtattcatcctcagcatgacccctgtccctctgagagtgcatattcttcctgatacaggaactgtctgcggactccagtttctaaagcaatggcccagacacactcccttgtctacagagtaggaaatttaggtctgacaaggctgtctttcagaagagagacagaactgggagcttggcttcagagctgaagatacagatttcagtagtggcctgggtcagcaggaaagcaagatttgcttggttatggtgtgatgtgcagctcagcgtcacagtctgcatgggggcatatagggtgccggtccctgcttttccacttagtggtaggatgctccccagccaggttgcttaacctgcaaacatcactgtttcttaagctacaggatggtacagagattatatcctctacctcccaggaatgttgtgggaaattcatgagatagaaaagtaccagagttcaggaagggtgagtccccaaggctccctgaggccagaggtactgcccttctgcgggactttatgttacaatcaacctatgacaatgcacaaataaatggtcattcaattacaaaagagtacaaggacttatatttactcagttcatccaatatcaattataataacccacagtgtaaactggaaagtaactacatggaaatcacttctccttccttcccatctaaggtctcagaagtgctttcccagatgtgatctcattaacctctatatcgatctgagaggtgttaaccaaaactggccagcacaggggaaattactcacctaaggccttataatgggcctggccccccgtgttctattgcattgtttttctgcaaagcctaatcttgcagggttacattatacatatttttctttctttttcttttcgttttaccaaaagataaaaatatatacttttttattgttaagaaacattttcataaataagtacttatttcattccttactgaaatggcttttttcttactgacccattgaaaccatgttggctatgttcaacataactagagatatctttggcgttttcctcccttagcttcatatcttgtagaacatcttgtacaaaaaagtagatttacagaaaaacatacatataaatcacttattaatctccaaatgtagtaaaataacatagcaaaaactttatcaaatccatttcgtgcacaaactggacagatctgttacgtataatctctatatgcatctgcagtgttttataaattggtgctttgacatcaaaaaggaggtttacaaaaagtcccctctagtaatatcaatgactcggaatgatctcactatcattgcatctcaaattcccttgaatttatactcatcactgtcatatcaccattcttacaaaagcggttattttaaggaaaaagatgcagtgtgattatgatataagtaacattcaaaatttcatgttatcaagagttaagcagagtactaatttcccctttataaacacatgcacatccacgtagaaattcaaagtcaaactgcgtaaagtgcttttattgacagaaggcatcacacacattcccaagcagcattgttcccatgagaaactgaaaacgtatttctttgaatctagaatgcatcttccctcttccaggtgtaaccattcagagtttttcctggagcgattccagcttgtttccttttggtgccttccttaagaaattttgcagctgtttctggtgcagtttttgggtgggctctggggtgggcagacgatcttcactttgcagaggctgctccttttgtgagtggagctggtggtgagggagtaggagaggcctcgcatcatcctggcattcaggcccttagccatggagaaggacttgaggtggcttcttaaggcaatggggagcgggagcttgtccaccagatgcacaggtgtgcaggacacgatggtgcggcagcagaggtcttgcaagctcagtaccttgctcggcctcccgagccagttcaacctgtgccgcagcagcactatcctggccagctccgtgaaagactctatgatgttgaaattgcacagagggctgacctcaaagaaggtcacgcccaggcgctcggcgtaggcctgggcctgctccctgggcacctgcctcttgaatgccagatgtaggcgattccccaccaggattttagggacaccaggggcatgttcctcaatcttcttaatccatcgatccataccctcgaaagaccagcggtttgcaatgtcgtagaccaggatcactccttgtgcaccacgagagtaggagcggaatatggtacaaaatcttccctgccccgacgtatcccagagcttcagcttcacccgctggccgtccagcaggatggtggtcgtcttgtagtcgattccccccaggtgactgtacggggactcggccgtgccgtcctgcaggctctccaggatctcactcttgcctacgtccctgtcgcccaccagcaggaacttgagcaggaagtcgtaggcctggtcggggctgcccggggcgctcatcgtgctggccccgccccccgcctgggccagaccagcaaggttgtgcgcagaggcggtgccgggcctatttttcttgagaaattagcatagaacataaaaaatgggatggggaagtctacgaaataaagtgaaatgaggtggtggctttgatggttttcttttacaaaccctgggaaaccggttcagcgattgttttcctttttcttacccagcacagagtagtgacacagcagttaattcatcatggaaacctatacatttcccttaaaactttcatgtgatcgttatggaaccatgccttttggattatgtcaaaggaatctcctttaaaggaaggacgggtatgagataggaagcagactaagatgtgttgagtaccgtatgtaccctacgctgtgtatgacgcttaaaataatttgttcttttacttctcagaacaattgtctttggtagctatgattgttttcattttacaaatgagaaaaggcaaactcagaaatgttacgtaatttttaaaaatcttgccgttagtatagagatcacagaaatcacaatcctgagccagtgctctccttatataatgccccacacatcctttctactctgtggccatgccgggtttaggagtaagtgtgaactgtctgtgcatgtgatccttgacaagccacgcatgtttgcatgggcactaacacattttttgctgcagggggacatctcccataaatataagagccaagatctcagaagaaacatctaggatatggatttttctagagtgtctcataaataatattcagccaagaaagatgtgttgaaataacgcatgcatagatcaatgaagggttttagatttaacacacgtacagatcctataacaaaacagcaaaactgacaaaatatataaatggttcatggatgatgaaatgcaaatggccaataatcataagaaaatgcattctagctcactaatatataaggaatgcaaatgcaactatctaaatatacttttatcacctatcgtttgacaaaatttcaatgtagaaaaaactgaataagaatttttttttaatttgcaaaagaaaaaggtaaaagtggctctgtgtgtgtctgtgtatgggggcaggatgagggaccaaatacatcaaggaaatggaaacacacttctcagttataaatgcatttaaatattgtaactacaacaggtataaagatggttaaaggaatgagaatgctcagacacatataagggagtttaaattattgaaatcaagccccaagggatagatgtgtaagcatgtaatggatgaaacatttttcacatgtacaaaatagccaggtaagaggttatttgctacagtattgctgaaatctttttaaaaaggaaaaaatgagaagcattctaaatactcatcaatacagaacaaacaataacaaagttgtctccctaatttacacaaactcccctaaagacatcgccatgatctgaatggtggaatctgaccatttcttaagccttggaagtgcatcttctaaaagggaggtgctctcagggtcctctagggagggtgagggatagaacctcattccaatcctgccacttacctcaagaggcgacttaggttctgtgagcctgagcttggtcatctgtgaaatgggactgactataccatcctcacggagttattcccaggcataaatgggaaaacctgtccagggtatatggcatggaatgggaggcttcaatggccctttaaatattgagacatagcagtaggggttagctgaacctcaaggccaaggcaggcatcgtgaaaaatcattactcattgtttctcctaatgaaaacacagacatccatataaagaaggcaaatctccctgatacaccttgatttcagagttttagagatggagttctctacattcttgtgtgtttcataatctcacgaaaactgttcaacatcatgcctccgagaagacacaaaaccagttccccatgctggtaagaaaaaaactgatcggtgtaaatgtaaaaacatatgctccagggcatccacaaaatgaaacaccaggtagcagtgacggggctgtagaaaggtgacggagagaggtcggaggcactggagcagcatctggggaactgtgtctatagtgtcctggagaggggaagactgaaagagagtgtgagaaggtctgagaagcctgtacagggatagagttatggagagtgaatgccttgctctctggagggacccctcctcccccgcccccgcccccgccccctccgacagtgtggacacttcaacctacactgagaagggaagagatgataaatcagtgaatgcgatgtagatttaggggtcaacagcaaatggacctgctttaatatacatgtgaattttccaaacagaactggaatcaaagtaaacaagtcattttgaaacatgttactctgcaaaatgtacaaaaacagagatagctctgatgcctcctagtggccagagacagaaacgcagctctgataatctcaaaccagggactcaggaagagggaggcatggaggttggaggttagctccaatgtatcagccacagttttctggaattattcacctaatggtagcaatttccatgtatccatcatgttccagaatatatgaaactgatattggttccaatccccgctggaactaaagttgcatccatgattttgtatttggggtggtagagctagaggacacacccacacaaacacccacacacacacacaaaacctctgtcaattggacttgttatttacttctttcacaataaaatagaatataaggaatgctttttcaaattaatggacattatgtacaccttaactttgacaatttgttccaaagtattttgtgtgttcaaattttcatcagaatacttttattcccaaataccagtttttgaacagtacacaagagcatattgataaatcaaaattaacctgagctctcactggtcaactcccactccttaaccccaaggggtctgctgttcctaggatggtgcatactctccagacatgtccctgaaggtgaggtacacatcaacacgttcacctacacacacacattgtcttctccaaaagtgcaatcatggtacttatcttttgcatcttgtcattataaattctcaagattttaaaatatttgcattttattagttcttgtggggttggcgtattttagtatgtttattgttcatgtacatttcatttaaattctctgttgaaatagttgccattttgttactatgtttcacaaatcatggatactaacccaattaaacttcaaaatttgactttaaaattacacagatcttaaatttcaaagaaaaaacattgaaaaacacctggggagcaggtactgccagcctggagggagattagagcattcagggccctggaggaatgaagagaaatgataaaagtctagagtattacagagtttgtgcttatcaggaaacaacaaagttgtctccctgatttacgtaaactcctctaaaggcagcagcctaatttgaataatggtgataatgaccttgggtagcagttaagattaaaggagatgaggtgtaaagtgcatttgcttacagtaattcagtgcatgtttctttccttctctgcagctcacctgtcccaaggccaacacctgagcttctgcctgagcccacttgccactttaaggatcagccctctcatgtggccctacaaccagatctcatggcacaaagcacaggatttcacttcccctgtcatcttcagaggagttgttgagtgggaacccatgggactacaatagcaggggagtggaatctgaccatttctcaaaccctggaaagccatcttctaaaagggggtgctcagggtcctctagggaaggtgagggatggaacctcattccaatcctgccacttacttggaaaagtgatttaggctctgtgagcctgagcttggttagctgtgaaatgggattgactataccaaccttacagagcagtcctgaggggtaaatgagaaaatctgttgagaatatacagcagggagtggcctttaagtattggtacacagcatgaggggctggctgagcctcaaggctaaggtagtcatcatgaaaaaatcacttctcattgtttcgcctaatgacaacacaaacatcgtgaagaaagaagcaatctctctctgaaatgccttaagttcaaagttttagagaccaaaggtctctgcattcttaggtgcttgaaagttcctaagagctattcaacatcatgcctctgagcagacccaaatccacttccccatagtggtaggacaggagcgtttgtgaactcacctggtgagctccacgacagatcacatcagggacacaaggagtggcaattatctaatgagtgctccagcactgctcagtattttaatatgtttataggaatcctgtagaccggttctgcagtaaacagtgcaaggttcccagatcacacattatccagctacattacaagaggatttcagctatccgctgcctccttgagaggcaaaaatctaggaattacaagaatttctataacagacaattttctattctttcattaggtaataactgaaagtgtattgagctttaaaagcatactagtctactggaggtgtctcattaactaaagtggaaagagggtaagaattcaaatgaatatatgggtaacttcatggttcacatttgagaggagatggtttcttcaaattaactttaaactttctcaaactccaaagaattgaaaattcttttttgttttaaaaatccttttttgttcctcatcacctgatacagttcgaatatatgtccctgccaaatttcatgttgaattataatccccagtgttggaggttgggcctggtgtgaggtgtttgggtcatgggggcagatctctcaaggcttggtactgtcctcatgatagtgagtctcctgagatctggttaagtgtgtggcacccccccgcccccccaccgctcccaccgccactttctctctcctgctttcaccatgtgacatacatacttcagcttcacgttccatcatgagtaaaagctccctgaggccttctcagaagctaaacagatgttggtgccatgtttgtaagcctgcagaaccatgagccaattaaacatctattctttataaattacccagtcttaggcatttctttatagcaatgcaagaatggcctaatacatcatcaattcaattcagccacaggatatctttcttttctcctctcccctcttctctctcccctcctctccctttcctttcccctccccctcccctccctctctccctctttgactctgtcttttccttctccttcaaaaaattttctaattttctacattctctattaacattatttcccatttactctttatcccactgcgctgtggcttctgtccccaggattgcaatgaacatgatctcgccaaggttacaatcccctttttggtcactaggttcagttttttgtttacatatataaccatactgagtattgctttcaatgaactcataaaatatgcatgcttgtccagtcgtttctttaaatttaacacaaatctgtgacaggctctggagcatgaggtactggacacaaatccaagctgtcccactccctaactatgcagtatcaagcaaagtctttattctctctgtcattcagtttttcatctataaaataaggattagtcacagtatctaccttgtaaaacagctgtgagcactgactgactcaatacattaaaagcatacagttcataagaaatgttagtcattttaaattctttttacatatcttactggcattagtatcactgtagacatgaaaagtaggatatcagccaatgaatagtttcctagggccaccataacaaattatcacgaactttgcacatttaaacaacagaatttcattatctcatggttcagaagtataaaaccaaagcccaaagtacaaaaccaaggtgtaggcaggaccacactgcctccaaaagctttaggggagaatcctttcttagctcttccagctcctcctttatttggcttgaggcagcataactccaatctctacttcaatcttcacatggccttcttccttgcatgtgtcaaatctccctctgctttcttttatatagacaccagtcattggagttaggcatcaacctacattcaggatatttacttctggagatctttcacttaattatatctacatagaccctatttccaaataaagtttgggtgggttaggtttgggacatgttttgagggggacataattctacccactacagttaaacacgcaagttacactacaaatgttagataaggtagcttttatatgttaatatataaatgctgtatgcatatttaatctaggtttttatcctctgtgtatgaagtactcttaaacaacagagataggtcaattatatcaagagacaatgcaataaaaaccaatattaatctccccaaaacacttgtagacacacacacacaaaatgaaaaagaatcagatttggacaatcaacaaagtcataaattataatgtagtatatggttccattgtgaaaaaatatatatatctatctctctctacatgggtttatatgtatgtgtgtgtggctaaaaataagttagtgtactacatggagagaaaaaagatctggagaatagatacgaataaattaatacaggccatctttgtattatggagatggagaagatttagacagaatatttttaatttctaatatacatttcaattatgtttcatatggcttaaacaataaaaaaagttaataatgtgacaaagtcattaagataatgttttgtaaatcaggaaaatctgtgaccctagtcacaaaatgatagtgtagaaatacatttattgactaagaatcacattcatatgctgtggtataaaaatagtatattaaaaagatttatttaataaatcagtatatttgccttggagggagatagaggatatttgttttataaatttgcaattccctagtgttttaaatgtggaaatttcattgttcaaaatgttaaaaacaaaaaacactgtaattgtgacctgattatatttatgatgcccacatattcattgctctggaaacatgcatatagaaaattccagaaagctttgttctctacaattctatacaatagaatacatgtgcctcccttactccactcaaatctcctacccctttccaagctcttggttgactttaatttctgcaattctgactctgggcaccaggtgagagcattctgtatttcttccaatgaaaaggcataatttgtataaacagaaacaaaattttcctcaaagtagataatgaaacaataagtacagcatgaccacaactctctttgaaaaattcatgtttacaaaaagatggacaggtcatatacatagttttgtttccttgcatactcctatgtctacatctaattagtttattaaataggttttgggtgtctacttcagaggttcaaacatcttatgatgaaatgctactggaaattttataatggatggatcagggtgacaacactgaaatacagtgatcaatttcaagcttacaggaggagagacaaccagacccaatgaacctactaatttgacactttagtaataaaggacaccacttctgaggtactcttgctgaataagctgaatttgatcaaacttctaaatctaattaccaatttaaaagaaataagagaggctagaggaaattaataaacaacacaataagaatccaatcagcaaaatccataatgcaccctccaaaggatgaaagatccagttttctaagcaaataaatagaaaggtttttttttttaaacaacagatagcttttaagagacaacacttcaaggagagttaaagagaaagtaaaattaaaatcacaaggagatactatcacatgtctaccagaaagagaaaaatgaaaaagatagaaaataccaagtgttggtgaggatgtggagcagtagaagtctcaacattgctagtgggaatatagattggaacaaccactttgaacaactgtttgacagtatccactgagctgaagatacacatgtcatatgactcagaaatgccactctttggtgcatccctaggagaaatggcctcacccatcaaaggaaatcagaccagccctgcctttcaaccagttgaaggatagaaaccagaataaatgtgatttccatgtgtaaaagcactcggagttcctgaaagggaatagaattaactgtagaagtccaaggaattatttcaacagccaggttgtctaaggaaaacttaactgtgatgattattacctttttaaaaataattatacttttgtttttacattatcttgtttgtttttcttaaataaatatcatctggtacatggaagaaaggctactgaaggatagttatcactcaaagacatatggtcctgtctaccatcaaccaccattggctgacatggtttggcaaatgtcttttcctcttttctaagtatactggttaggagtgttggctgtggagacagactagggcccaaccctgcttcttaaatttgtgggactttgaatacatttgcttcagcttgcagtagctcaaatgcttcatctgtaaaacaaggataatagagtactgacctaagaagacaaaatatttttaaacaaatattgccttgccattttggtcaggaatcccataattttaaaaattctactgcggagatatcagcataactggctctctgtgaccttgtgagagtaacagaattactctatacttcagttgtctttaaggtacaatggggaaaacaattatccccacctcatgggttgttgttttgagaattacttgagttgaggcacaaaagcccttagaacagtggttggcacatagtaaactgctcattaaatgtgagtttgcatgttgagatttttcaagttctaaaagtttgacagtttgcacgtgtcttcaataaagtttaatacaacagaatcttaatcatcaactgatgcattttaaaataacttcttttcactacaaccacgtttggatgacctaattaccttgagaatatctcaagagcaaatggaaggactgctctcagaaaacggtgtcatttctccacatggctatacaaaaaactgaggggtcatccttgactgtgccttatccccatgcaccctacacgcacagccacttcaagttctgcctgctgtacctccaaacacgccctgtccaggttcactcctccctacctgcacacagctgcagccctggtcccatccacctgtgcctcttccctggacttctgcaatattttcctaatggttatccccactccctatcttgtccctttccagtccattccccacacagcagtcagagtcgccttctgacaacaggaatcgcaatcaacggcacatttacaaattgtaattcacctgaatctctcactagccctactccaacctctgacccaagggatctgttgtcctaaggatgttgcatactcttcagatgtgtccctgtaggtgaggtgcacatgaatacattcacccgattcacatagtcttctccaaaagtacaatcacagtcctcatcttctgttgcaatttttttccactttatataaattctcaggatttttaagtatttgcattttattagtacttttggttttggcatatttaacaagattattgttcatgtttattttatgtaaattttctgttgaaatgaattaccaatatctttgtcattagtgtgtgttacaaattacggatactaatcctatatatggtacagtttgcaaatactttctccaatgttttaagataattcttaattttattactatcgaaattgattttcaatttcaaaaatattatgacttaaaaactttacagatcatttttttttttaagaaaaatttgaatgctcccattggaatggcagcccccagggaaattagatcattcagggaccaggaggcatgaagacaaaatgaggaaaactttagaataactaaaaactagttgctgatagggattttatctcctctatcatcttcatcaccttgagaggttgaagagtgagcacctcacctctggggccacaatagcaagagagtggaatatgaccatttctcaagtcctggaagcccaacttctaaaagaaaggtgctcaggatcctctagggagggtgagggatggaacctcattccaatcctgccacttacctagggaggtgacttagactctgtgagcctgagcttagtcatctgtgaaatggaactgattatacaattgttacagagctgtccccaggcataaatgagaaacgttgtccaaagtatatggaatggagtgggacttcaatggcctttaaatgttgagacatagcagtaagggctggctgagcctcagggctcaggagacattgtgaaaaatcatttctcattgtttctcctaataagaacacaaacatctagaagaaagaagcaaatatctctctgatatgccttgagttcaaagtttttgagatagaaggttttctatattcttaggtattatcagaaggtcacaggagtcattcaatatcatgcctcttagcagactcagatcaagttcccccacactggaatgacaaacatatttgtgaactcacctgaagagctctgtgatagattgcatgaggaaagcaaagtatggtgtttgcttaatagctgcttctggacagtttggtatgttaatatgtttataggaaaaatctgaacctgtccaccagtcaccagggcaagggtcctcagatcatgcatgatccagtcacatcacaccaggatttcagccatcctctacctccctgagaggcaaaaatccagaaattactagcatttctgtgacacacagttgtccgttctttcctcatctagtaactatatttgtattgagctcaaaacatatactagtccattggagacatctcatgagctctaaagtggaaataggagagtaagaaacaaaataatatataggaaaattcaagggttaaatacgagatgaaatgggttcttcacattagcttttaaacttactgaaatttcaagaaattgaagatttttaaaaattcttcctttaacccctcaccgcctattcagccacaggattggatatctttcctcccccaacttttttttctctctttccttttttccaaccaaagttaaagctctaaaacgagttttctgcacttcctacaaaactacaatgagatatcatctcactccagttaaaatggctttctgcaaaagacaggcaataacacatgctggcaaagatgtggagaaaagggaaccctcatacactgttgatgggaatgtaaattagtacaaccactgtggagaacagtacggagggtcctcaaaatctaaaaatagagctgccatatgacccagcaatcccactgctggttatacatccaaaagaaagaaaatcagtatatcgaagagtatcttcactcccatgtttgttgcaacattattcataatggccaagatttggaagcaacctaagtgtccatcaacagattaatggaaaaagaaaatgtggtacatatacagaatggagtactattcagccataaaaataaagagattctgtcatttgcaacaacatggatggaacaggtggtcattacattaagtgaagtaagccaggcacagaaagacaaatatcacatgttctcacttatctgtgggaccaaaactcaaaaaataattgaacccatggagatagagggtagaaggatggttaccagagtctgggtagaggcggggaggtgagggagaggtggggatggttaatgagtacaaaaaatagaatgaatgaataaggcctagtatttgatagcactacagggtgactacaatcaataataatttaattgtacattttaaaataactaaaataatataattggattgtttgtaacacaaaggaaaaatgcttgaggggatggataccccattttccatgatgtgactattatgcattgcatgcatgtatcaaaatatctcatgtaccccataaatatatacacctatcacccacaaaaattaaaaattaaaaaaaagcttaaaggatattgagtgttgatttttctctccttccccaaacactattggaaggttaaaaaaaaaatttcctgaaatcataaaacacgtgttttcctgtgtctggctgtgttcaaccaacataatatatatgtgatttacattttgttgtctgtagttgtagatagtcattttcattgatggatggtatacatggtatggatatttcttttcttttgagatggagtccagctctgttccccaggctggagtgcagtggtgtgatcttggctcactgcaacctccatctcccgggttcaagctattctcctgcctcagcctcccgagtagctgggattacaggtgcccaccaccatgcccagctacgttttgtatttttagtagagatggggtttcattgtgttggccaggttggtctcaaactcctgacctcaggtgatctgcccgcctcagcctcccaaagtgctgagattacaagcgtgagccaccgcacccggcctgtatggatatttcacgacatatgtatctggtatgaaggtttgcaaattttgacctactatgaataatggtgctttgaacattcttgtacatatcttttagatggacgtttatttttactttacttcgacatatatgattgagtggcatttctgagttagggtatatgtatgttcagctcactagacactgccagtttttcaaagtgttccaatccgtattcccaccagcagtgttgagagttccactgctccacatcctcaccaacacttcacttggcattttcaatcttttttatttcttgtgggtctatggtggtatctaattatggttttaaatgtaatttctttgatttaatttctctttaatttaactctgaaatgtttcgtctcatttaatctaaagtgggttccaccgcatttttttttaaccttctaatttatttgcttaaaatctggatctttagtcttgtggaatgctgatgctgttaaatacctttctgcatatggaggtgatcatataattatttccttggctgtatcaatatactagattatagtaatagttttattgatattgaaacatgtttatatatataaaagccccataaggtcatgacctgtattttatgtcctcttttgtttactaatattttatttaagaacattagttcatattctgtgatgagattattctggaatttcatttctcctgcagtttttggcatgtttcagaatcaactttatgtacttgcttcattgtttcatatattccctatgcccttcgactattttaaatagtattggtattatcataccttgaaagttttgctagaattctctttgggaaagctctgggtctggtgctttttgaaggcagataatttaaccaaattcactatgtcttgtatgcaattggtctgttaagactttttgtgtttcttgaggccagtctgggtaagttgtgtttttctagaaaattactgattttatctgtttccaaatgtatttgaatagaattatgcaaatttttcagttaagagacttgaaatttccttcgttttgaagaccttgtcaccgtttctgtttcaaaattgtgtatttgtgttttcttcaattttcttgaatactttacccagtgacttttcatgtttttggtatctcctcaaataaatcttccttacttttacatataaattatactgtagtttgcctttttaacccatttatttctgttttaacctttaactattcaactgcattcttttagtttatgttgtggttctttatctggctttttgaattgattgttcaattcctttttattgatatagctatgtaatgcataaaaatattatctgaccactgctctagctgtaaattctgaatatgttctgtttttattttcattactctcattgcattctacaattttaatctgtatttgcatttgggcccaagcttaacagcctcagatattagtatgatttttcatatatctcattgctgcttctgcagttttcctctataaaactacatttttggctgggtgtggtggctcacacctgcaatcccaacacttttggaggccgaggcgggtggagcacctgaggtcaggagttcaagaccagcctggccaagatggtgaaaccccatctctactaaattagctgggcatggtggcaggcgcctgtaatcccagctactcaggagactgaggcagagaattgcttgaaaccgggagggagaggttgcagtgagccaagattgcgccactgcactccagcctgggcgacagagtgagactccacctaaacaaacaaacaaaaaaacccaaacaaacaaataaacaaaaaaactacatttgtgttgtgtgactaggtacacaagtattaatacataatgtattcctagtgaattttaacctttactattattaggtgtgcttttttatcttttaaaatccattttgttctcaattctgccctcttaaaaattaagattgtgaaaaatattccatgctcatggataggaagaatcaatattgttaaaatggtcatactgcccaaagcaatttacagattcaatgctattctattaaactactagcaatgtttttcacagaactagaataaaaattctaaaattcacttggaaccaaaagagagcctgaataaccaaagcaatcctaaatgaaaagtgcaaagatggaggcatcacactacctgacttcaaactataatacaaggctatagtaattaaaacagcatggtactggtacaaaacagacacgcagacaaatggaacataataaagaacacagaaataaagccacacacctacaaccatctgatcttcaacaaagttaacaataacaagcaatggggaaaggacttcctattcaataaatggtgctagaataactggctagacatatgcagaagattgaaacttcacctttacccttcaaaaatcaactcaaaatgcattaaagacttaaatgtaaaacataaaactataaataccctagaagaaaacttaggaaataccattctagacatcagccctggcaaagacttcatgatgaagacaccaaaagcaactgtagtaaaaacaaatattgacaagcaggacctaatgaaactaaagagcttctgcacagcaaaagaaactatcaacagagcagacagacaacctacagaatgggagaaaacatctgtaaactatgcatcttccaaaggtctaatatccaggatctataaggaactaaatcaacaagcagaaaaacaaccccattaaaaaatgggcaaaggacatgaacagacactactcaaaagaagatatacacatgaccaacaagcatatgaaaaaatgttcaatatcactaatcattagggaaatgcaaatcgaaaccacaataagataccatctcacaacagtcaaaatgtctattatgcaaaagttaaaaagtaacagatgttggtgagcttacagtgaaaaggggatgcttatacactgctggtaggaatgtatattagttcagccactgtggaaagcagtctagagatttcccaagtaacttaaaatagaactacaattcaacccagaaatcccattactgggtatattcccaaatgaatataaatcgttctaccataaagacacatgcatgtgtatgtttatcacagcactattcacaatagcaaagacatggaatcaacctagatgcccatcaacagtggactggataaagaaaatgtggtacacatacaccatggaatactacagattcataaaaaagaatgagatcatgtcctttgcagcaacatggatagagcttgaggccattatcctaagcaaattacttttactttgatgttcttttgtgccatcttctttcaccttctatttggacaccgaaatagcagcctctccttgaggaccagaaagcagacagcatagagtaacagaacatgaagatgaatctgctgtacaacagactgaaatcaggagacctgggtcctcaatagcagatttagctttgtgtaaaaaagaccatgagaagtcagctggcctgatctggcctcatccctttcacaggaaaagactgacattctcaggggttaaggacacgagcctcggagtcagagtgagtacaatatttcggcatacttaattactggttttatgatatttaggaaatgttgagtctccagacaaatgaaacccatatgtaatggatatatattaagtatgcctgcatagagaacaaagtgggaggaactatacaaaaaggacaatttatcaaaaattaataagtgggaggggtcagggattatttatttatttctgagcttgactatgctttccacaatttataaattagcatggagctttttaaaagtcagaatttttgctcatagaaacagtatttgttataaaatagttcagacatacaaaaattatagaatgtgagaactttctatgtaaccatgctaacatataaaatagtatataggcaatcgatagtcacattgaagtctgattgtattagcctcctacttcctcagagataatcactatacagaatttggatttttcatttttaagacattaccttataattacacatgtacatacctgtatgtaaaatatgatattgttttgtagcatggttttctctctaaatacctggctacctcattgaagaagaagaagtaagaaacctgaggagaacaaacatgcattcatatctcaacagtgggacctgctatatatatatgtctccaagtcgtgtgtattatcttttagactactaaaacagacacatccaggtctcagtttatatgctatagagagcggtaaaacattctacagttactattttcaaactcttcttttatctgatatgttcaatgtctcagttttcctgtggctaacttgcctaaaacaatctcagtgtatcttgaatgcaagacattttctcatttgtctggggctaattttctacctttctttcaaactgttactaatttaggcctgtcctttataaccagaacctaatctagaccatcctgctgaaagaagacagtattttctgggagttagttttcatgtgttcagactactgcccaaatcccttagatggtatagggatgcattccatttagaacttgatttgacatctattacaagtgctgggcatgtgtatattttccttttataacttttaattacataaggaaggtacttgtgtaattatacatcatagtcaagatgtagaattgacctaaaagttcatcagtggatacacaggtaatgaaaacatggtgtattaattcacatttgttgattgctcctgggaccctgggctgaatgagactatgactatacttctaccccgaatcccgctgtgtcagggttcccctctccttatcctccccattcccccactgaagctgtaatgctgaactctgagtgatttcatgaagaccatcccgctttcccgtctctgtggcagtcactgcttggctaactaggtgggataagcaggcagtaggaagtgaagaatgttaacaaggactggagaaaggtcttttaggtagtttaaatttgaaggagaagagagagacccagagataggacatagaggtggagggggcaggagacagagagagagagagagagaggaggggaggggaggggacgggagggagaggggaggggaggagaggggaggggaggagaggggaggggaggagacaggaggggagaggaaaggagaggtatcaatcctgtggctaaatgtgtattgaggggtccaagaggaatttttgaaaatctttcatttcttaaaagttgatcaagtttaaaaattaatgtgaaggagcataccatcttaaaactaatctttgaagttagtgatatattattttcattcttactctattatttccattttagagatcatgagatgcctttagttatacaggtattgagcttaatatatatttagttattaatgaatgaaggaatggacaattgtgtgtatagaaatggtagtaactcttggatttttgtgtttcaagaggtagaagatggttaaaatactgctgtgatgtggctggataatgcataatctgagggtcaccgccctggtggctgtgaaacagtctagaattttcctgttttacatatatgtgtgtgtgtgtgtgtgtgtgtgtgtgtgtgtgtgtgtgtgtgtgtataaaactttttctttttttgagacagtgtttcactctgtcgcccagactggaatgcagtggcccgatctcagctcactgcaacctccgcctcccgggttcaagcgattctcctgcctcagcatcctgagtagctgggattacaggcgcgcatcaccatgcccggctactttttgtatttttagtagagacggagttttgccatgttggccaggctggtctcgaactcctgacctcaagtgatccgcccacctcagcctcccacggtgctgggattacaggcatgagccactgcaccctgctttcctataatatattaatataccaaacagtccaggaacaaccattaggcaaactccacactttgcttacctggtgttatctatcactgagatcaccaggtgagttcaaagacatgcctatcttcccagcatgaggaactgaatttgggtcagctcagggacttgatgctgaacagctcttatgagcttctgataacacccaagaactagagaaacagctgtccataaatctttcaactcaaggtatatcacagggacatttgctttcttcaactagatgtgtatttttctcaaaaggggaaacagtaagaaatgatttttcacactgcctccttagccctgaggtctgccaacccctacttctgtgtcccaacatttaaagaccactaaagtttcactctatgccatatagtctgggcaggttttctcatttacccctcaggaaagctctggtattgtcagttacatttcacagatgactaagttcaggctcacagagcctaagtcacttccccagataaatggcaggattggaatgaggctgatcccattaatcaagctcccaactccatccctcccttccctatgctgaaccctgcctcccctgcaacctggtctactctcagagctgcaaccttggctctggctaccagaaggcacatcatagctatctcaatttttgtttttaaattaaaagcagcttattttgcatagagtaacaaatattacaagttttctgtggttgtttggaaaattcacatgtatatgaaaacagttccattatctgttgaccccaaatctacattgcattcattgatttttcacttccctccttggtgcaggttgcagtgtccacattgcaggagggtgggtagggggtccttttcagacagcagggcattcagcctcctccattaccccacccctatacaggcttcccagatttcctcccaccttctctctgtcattcccttttcaggacactatgggcacagctgcccagaccctgctcctgtgccctcatcctctctctgtcaccgcccactgccccacactgccctatggctgcccgcctaggatagccaaggatgtcctgcagtttatttttttttccgtcttcttttaaacacatcagtatctttctgacagaatcattctgtacctgggttcataaggtgggtcgtaaggaggtattgtagtttttgctccttgcggacacttctttgctgaaaagtttgataatggtggtaccgtggtgccctttcccgacacaaatctgcattgcagctagaacaggaaggtgggaaggagagattgtggcccaagcccaccctataaagctttctggaaatcttggtggaaaagtgagcattcccagtgtataggggtactgaaggactccagacaaaaattgctgccttttactatgccgagaagagagctctatgtgagaggaagacaaaatattttaatttttattctttgacccctggataaatagagacctatataagaaaaaagggatccaggctacttgttatctttgtaaccctctttacatctttattactatcttttcatggaaatacatttctatgataacatttgaaattacaacataatatcaatattttttatggacccagtgtttcatttatatgatatcctaaagtttatttccacagtaacctagtggtgaaaatttagttcccttaccatagtttctattacagacaatggtatatataacactcttgctcatatgtacaaatatttcagtaataatttctttataagtttttgaaagagtatctttaagccccagacacttaaaaattttatatcaagatgatgaaatcaaaatacttttactttttttaatttttttttatctaaataggtttttggggaacaggtggtgtttgtttacatcaataagttattcagcggtgatttctgagatttcggcacacccttcacccaagcagtgtacactgtacccaatgtatagtcttttatccctcaacactccccactgtttcccctgagtccccaaagaccaatgtatcattcttatgcctttgcgtcctcatagcttagctcccacatgagtgagaacatacactgtttggttttccattcctgagttacttcacttagaataataatctccaattccatccaggttgctgcgaatgccattatttcttttttttatggcttagtagtattcatatatatatatataatatatatatatatatctcacattttctttatccactcattgattgatgggcatttgggttggttccatatttttgcaattgcaaattgtgctgctataaacgtgtgtgcaagtatcttttttgtataatgacttattttcttctgggtagatacccagtagtgggattgctggatcaaacgggagatctacttttagttctttaacgaatcgccacactgttttccacagtggttgtattagtttacactcccaccagcagtgtaaaagtgttcccttttcaccccaccttactcaaacatctattatttttttatttttttattatggccattcttgcagttataagatggtgttgcattgtggttttgatatgcatttccctgatcactagtgatgttgagcatttttccatatgcttgctggccatttgtatatcttcttttgagaattgtctattcatgtccttagcccactttttgatatttttattttgttttgttttgttttttcttgttgatttgagttatttgtagattctggataatagtcctttgtcagatgtatagattgtgaagattttctcccactctgtaggttgtctgttaactctgctgattatttcttttgctgtgcagaagctttgtagtttaattaagtcccatctatttattcttgtttttgttgcatttgcttttgggttcttggtcatgaagtctttgcctaagccaatgtctagaagggtttttctaatattatcttctagaatctttatgggtgttagatttaagtctttgatccatcttgagttgatttttgtataaggtgagagatgaggatccagtttcattcttctacatgtggcttgccaattatcccagcaccatttgttgaatagggtgtcctttctccacttcatgtttttgtttgctttgttaaagatcagttggctgtatttggctttatttttgggttctctattctgttccattggtctatgcgcctattttttttttttttttgtcttgctttggctatttgggctcttttttggttccatatgtacccatccatgagcatgggatgcgtttccctttgtttgtgttgtagatggcttttattactctaaggtatgtcccctttatgccgattttgctgagggttttaatcataaagggatgctggattttgtcaaatgcttttttctgcatctattgagatgatcatgtgatttttgttttaaatctgtgtatgtgctctatcacatttattacttgtgtatattaaatcatccctgcattaatggcatgaaacccacttgatcatggtggattttctttttgatatgttgttgaatttggttcattagtattttcttgaggatttttgcatctatgttcatcagggatattggtctgtagctttcttttttgttatgtccttccctggttttgatattatggtgaaactggcttcatagaatgatttgggggaggattctctctttttctatcttttggaatagtgtcaataggattggtaccaattctttgaatgtctgatagaattcagctgtgaatctgtctggttctgaacttattttttagttattggcaatctttgtattactatttcaatctcttcctggtttaatctaggagggttgtatatttccaggaatttatccatctcttgtaagttttctagtttatgcacataaacgtgttcatagtagccttgaataatcttttgtatttctgtgatatcagttgtaatatctcccatttcatttctaattgagcttatttgaaacttctctcttcttggttaatcttgctaatggtctatcagttttatttatcttttcaaagaaccagctttttgtttcatttatcttttgtattgtttttgtttgtttcaatttcatttagttctgctctgatcttcgttatttcttttcttctcctgggtttgggtttagattgttcttgtttctctagttccatgaggtatgatcttagattgtctatttgtgctctttcagactttttgatgtaggcattcaatgctatgaactatcctgttagcactgcttttgctgtatctcagaggttttgataggttgtgtcactattatctttcaattcaaagaatttttaaatttccatcttgatttcattgttgacacaacgatcactcaggagcaagttatttaatttccatgtatttgcatggtttttaaggttccttttggagttgatttccaattttattccattgtggtctgagagagtactcgatataatttcgattttcttaaatttactgagacttgttttgtggcctttcatgtggtctatctcggagaatgttccatgtactgatgaatagaatatatattctgtagttgttgggtagactgttctgtaaatatctgttaagtccatttgttataaggtatagtttaagtacattgtttctttgttgactttctgtcttgatgacctgtctagtgctgtcagtgaagtattaaagtctcccacttttattgtgttgccgtttatttcatttcttaggtctagtagtaactgttttataaatcaaaaggtccagtgttaggtgcatatatattcagaattgtgatattttcctgttggactagtccttttatcattatataatgtccctctgtcttttttaactgctgttgccttaaagtttgttttgtctgatgtgagaatagctactcttgctcacttttggtgtccatttgcatggaatatatttttctatccctttaccttaagtttatgtgagtccttatgtgttacgtgaatctcctgaagacagcagaaactaggttggtgaattcttatccattctgccattctgtatcttttaagtggagcatttaggctatttacattcaatgttagtactgagatgaagtactattttattcattgtgctatttgttgcctgcatatatatatacatacatacatatattttggactgtgttattgtcatataggtcctgtgagatttatgctttagggagattctattttggtatattttaaggatttattttaatatttagagctctttttagcagttcttgtactgctggcttagtagtagtgaattctctcagcatttgtttgtctgggaaagactgtatctttccttcatttatgaagcttagtttctctctggatacaaaattcgtggctgataattgttttgcttaaggaggctaaaaataggacccaaattcattctagcttgtagggtttctgctgaaaaatctgctgttaatctgataggttttcctttatagattacctgatgcttttgcctcatagctcttaggattctttcctttgtcttgactttagataacttgatgactatgtgcctaggcaatgatcttttttgcaatgaatttcccaggtgttctttgaacttcttgtatttctccagatctctagcaaggccagggaagttttctttgattattccctcaaatacgttttccaaacttttagatttctcttcttccttaggaacactaattattcttaggtttcgacatttaacatagtctcaaacttcttggatgctttagtcattttttttacaattctttttttttttttttttttttgagacggagttttgctctgtcgcccaggctagagtgcagtagcgcgatcttggctcactgcaagctccacctcccgggttcacgccattctcctgcctcagcctcctgagtagctgggactacaggcacctgccactatgacggctaattttttttttttttgtatttttagtagagacagggtttcaccgtgtttgccaggatggtctcgatctcctgacctcgtgatccacctgcctcggcctcccaaagtgctgggattacaggcgtgagccaccacacccagcctaaaattcttttttctttgtctttgatggattgggttaatttgaaagcctgtctttgagctctgaagttctttcttctgcttgttcgattgattgctgagactttccagtgcgttttgcatttctctatatgttccccgatttctcgaaattgtaattgttttttttttaatttatgctgtttcactgaataattttcctttcatatcctgcatcacgtttttgatttatttaagttggacttcatctttctctgctgcctcttttattagcttaataatcaaccttctgaattctttttctggctattccaagatttcatcttagtttggatccattgctggtgagctagtgcaatgtttcgggggtgttaaagaaacttgttttgtcgtattagcagaaatttttttctcgctctttctcatttgggtagactatgtcagagggaagatctggaattcaagagctgctgttcagattcttttgtcccatggggtgctcccttgatgtggtgttctcccccttcccctataaatgcggcttcctgagggccaaagtgtcatgattgtttttgctcttctgggtctagccacccagtggagctactgggctccgggctggtactggggagtgtctgcaaagagtcctgtgatgtgatccatcttcaggttttgcagccagtggaggtagcaggggagtgaagtggactctgtaagggtccttggttgtattttggtttagtgtgctagttttgtgttggttggcctccagctaggaggtggtgatttcaagagtgcatcagttgtggtcctgcagagaggatgccaactttccctagggacagctggttaagtattcagatttctcaggcggtgggcagggccatagaactcccaagagattatgaccttggtctttgtctaccagggtgtgtagagaaagaccacccggtaggggcagggataggcatggctgagctcagcctctccttgggtgtggcttgctgtgactgctgtgggggatgggggtgtggtgtctggtccaatggagttatattcccagggggattatggctgcttctgctgaaccatacagtttgccagcaagtgggggaaagtcagcggtcatgggcctcaccctgctcccatgcagcctgcagccctaaaggctggtgtcattcccactgtgccctacaacagcaccgagtctatttcagggcaaccagtgaccagggctgagaacttgtcccagaccaccagcttccccactgacaaagcaagcagactcacagtttttcggcatctcagggggcctgcaacagtgatccagtttcttcaaagggtctgtggattctctcagctttcctggtatgttcctgcagtacttcttggagcaaaggtttacagtacgagtctccacatgctgctctgtccatctcagcaggagctgcaagctggtcctgcctcctatctgccatcttgcccccatgcatttatctgaaatcaaaatacttttaataaaagcattatactactaatattccagtgtgaaagttcctttctgctcatattagaaataatgtgaatctttactaatctgataggcaaaaaaaatcatctctcatcattgtttcaatataactcatttttgctctcttctgaaatttcatactgtggatgtgacataatcaattttcacaaccccatattattcagagtgttccaatattccctattatctacacgacatggatagcatcttttcagagtctgtgcactggtagtggttgtaatccagggcagagttcccatggctatttgctctggtgagctgaatgggtccccttggagcccaacaactatgttgagagaattgtagtattgtgataacagaacctggttgatgtaggagtgagtgtgtgtgtgtgagagagagagtgtgagtgtatgtgtgtgctgacaaccacatttccctttacttccttctggcttgtgtctttgcatctcatttcgtctccctttctaaattcaagcccaaaagtgaaaaaagggaaatatcaggatggcagtacttgtaaccagattttaatcaacattcttcactaagtcctgaagataaacatataaaaggaaatgctagcacaaagcgtgtgtgcctatgtaggccttgataagtattgctctacagacactcataaagtagtgccatttagactccccaagtatagggaggtgagaaaggctacagaggaatgaagaaagtactgacgctgacaaggtgttgcagaggaaaggccctggactctgtggtggacacacatattggtcatttgtctattttcggttttgttgtctgtgcttttaaggtcttagccataaaatatttgcctagaccaatgtactaaagtgtttcccccaggtttttgtctagtacttttatagtttcagatcttacatttaagtctttaattgatcttgagttgatgtctgtatatgatgagagacagagatgcagtttcattcttctgcatatgcatatccaattttcccaataccatttattgaggaggatgtcctttctccaacgtacgttcttggtgcctttgttgaaaatcagttttgtctgtaaacatgtggatttatttctgcgttctctattctgttccattggtctttgtgtctgttttcataccaataccatgctgttttgattaccatagccttgtaatatattttgaagtcaagtagtgtgatgcctccagctttgttctttttggtctggattggtttggttatccgggttcctttgtggttgcatatcaattttaggattgttttttctatttctgcaaaaaatgtcattggtactttgataaggattgcattgaatctgcagattacctttgacagtatggtcattttaactatattaattcttccaggccatgagcataggatatctttccatttgcttgtgtcctcttcaatttctttcatcagtgttgtgtagttttccttgtagaggtctttcacctacttggttaaatttattcctaggttttttttttggtagctatttcaagtaggcatgcctttttaatttctttctccactatttcatcatcagctatttcgtcattggtgcatacaaacactactgatttttgtatattgatgttctatcctaaaactatattgtatttatcaaatttgggagggttttgatggagtcattaggtttttctagatataaaattatatcatttgcaaagaggaacaaatgtaaagatatccaacttggatatctgttatttctcttgtctgattgctctggctaggtcttccagtactatgttgaatagtagtgatgaaggtgaaaaaacaagacccttgtcttgttccagttcttagatgaaatggtttcagcttttccccattcattatgatgttagccctgagtttatcatatatggtttttattattttgagttacgttcttttgatgcctagtttcttgagagtttttatcatgaagggatgatgaattttatcaaatgctttttatggattggttgagataatcatatggtttttgtccttcattctgttgatgtaatgtattatgtttgttgatttgcatatgttgaaccatctttgcatccctggtataaatcccacttgatcacggcatattatctttttgatgtgctgttggattcaggttgctagtattttgttgagaacttttgcatctattttcatcagggttattggcctgtagttttttgttgttgttgagtccttgtctggtttttaatatcataataatgctgccctcataaaatgagttagggagaattctctcctcttcaattttttttcagtagtttgaatataacttttgttagttctcctttgaaggtttggtagaattcatcagagaaaccatccaggtctgggcttttctctgttggaaaatttttattactgattcaatctcattacttactattggtctgttcaggttttctatttcttcctgattcaatcttggtaggtggtatacgtccaggaatttatctatttcctctaggctttccaatttggtggtatataattgtttataatagtctctgatgattatttgtatttccatgttatcagttgtagtgtctcctttttcatttctgatgttgtttatttgtgtcttctctcttttttttcttggttagtctagctgatggtttatcaattttttatcttttcagaaatctaactttttgtttcattaaaattttgtatatttttagtttctattttgtttagtttggctctgacctttactgtttccttccttctactcatttgggatttggtttttccttttttagttccttgaggtgaacagttagattggttatttggaatctttttacttttttgatgtaggcatctattgctacaaatttttctctaagcactgcttttgctgtatcccatagattttggtatgttgtgtttccattttcatttgtttcaaataactttttgatatcctccatattttttttcttgactcagtggtcattctggagcatgctgtttgtttattttccacatatttgtacagtttcccaggttcctcttgttattgatttctacttttattacatttttgtctgagaacatacttgatatgattttgattttttaaatttgttgagacttgttttgtgtccttctacttaactacttccttcaccattaaatagaatacagtaatagctatttcaaattaatgaacataatacacattacttttgtcaatctgtgcaaatgtatgttatgttgtgtctaaatattcatcaaaatatttttattcctgaataccaaatttcagacaatatacaaaagcacatatatgaattgtaattaatcttcacctctcagtagctcaactcctacctcctgacccaaaaggtctgttgtccatagaatggtgcacactttccagacatgtttctgtggatgaggtgcacatgaccatgttcacctacatatgcacgtaatctttgccaaaaagtgcaaccacattaatcatctccttttgcaagctgtcttttccacttaatattcttctgaggatttatattagcatcttattagttcttatagttttagcataatcaacaagttccttgttcatgtctatatctattggaattctatgtcaaaattagttgccaactgttttgttactgagtttgccctataaattatggatactaatccaacatctgagatgtagtttgaaaatgtttccccgttattttacagacattcttagtgttattttcatttagaatgtgttttcaacttcaataatatgaataagatatatatagattgtaatttaaaaagaaatactagtgaagaacaccttagggcgtgtgtactgtcggccttgagaaaaattcaagcattgagagtcctggagatatcaagaaaaaaatggaaaaatacttaaaaatacttaaaagtaattctagagttagctgctgaactggagagaaaagagtttattccctgctttacataaactttcctaaagtaccctgatttgaataattgtcaaagtgataggtaccttgaatagcagttaagattaaaggagatgaaatataaagtgcattttcttacagtagtttagtgtatgttactttccttctctccagctcacctgtcccaaggccaacacttgagcttctgcctgagcccactcaccacttcgagaagcaaccaactcatgtggccctacacccaggtctcttggcataaatggtgggatttaatcttctctatcttcttcatcacccagaggggttgtggagtgaggacgcattggtccacaatagcaggggggtggaatctgaccatttctcaagccctggaagcccatcttctaaaagggaggctactcagggctgtctatggatgatgagggatggaacctcatttcaatcctaccacctatctggagaagtgacttaggctctgaaagcctgagtttggtcatctatgaaatgggactgaccacaccatccttacagtgctgtcctgaggggtaaatgagaaaacctgtacagagtatatggcatagagtgggacttcaacggcctttaaatgttgggacacagcactaggggatggctgagcctcagggctaacgaggcattgtgaaaaaccatttctcattgtttctctttatgagaaaacagatatctagttgaagaaagcaaatgtccctgtgatatgccttgagttcaaagatttgtagacagttgtttctgtacttcctgggcactatcagaagctcataagagctgttcaacatcatgcgcctgagctgacccaaatccagctccccatgctggaaagacaggcatatctttgaattcacctgttgagttcagaaatcggtaacaccagggtagcaaaaagttgtttgcctaatggctattcctggactagtcagtatggttttgggctctttttttgtttttgttaaggaaaaatttggacccataccgcagccaccagtgcagtcttcagatcatgcggtattcagccacatcactccaggttttcggtcatctgctgcctcccttagagacaaaaatccaatagttactagcaagtctttgacacacgatagagtttggctgtgtccccacccaaatctcaccttgaattgtaataatcaccacatgtcaagcacagggcgaggtggagataattgaatcatgagggcagtttacaccatactgttctcatagtagtgaataagtctcacaagatctgatagttttataaatgggagtttccctgcacaagctctcttgcctgccaccatgtaagatgtgtttttgccttctgctatgattgtggggcctccccagccatgtggaactgtaagtcaattaaacctctttcctttataaattacctagtctcagttatgtctttattagcagcatgagaacagactaatacaacacacaattatccagtttttaattagctaacaactaaatatttacagagcccagaattcatgctattccattggaggtacctcatgaactctaaagtcgaattaactgggcaagaaaggaaattaatatatgggtgacttcattgcttaaatctgagatgagatggttcttctcattaatttttaaacttgatcaggtttcaaaaaattgatgattttcaaaaatccctccttggacctctcatcacctattcaaccacatgatagagataccactcctctccctctctccctctctctctctggcgctctccctccagcgctctctctccctctctctctctctctgtgtgtatgtgtgtgtgtgtatgtgtgtatatgtatgtgtgtatgtgtatgtgtcctcccccactggattctctcttcttcaaattcaaagttccacaaagagttttacacattccttgttaatactctccacttttcactgactctttatcccattacactatggattctgtccccaggatcatcaattaacacatacaaattaaaactcttttgaaataccttccttgtgcaatcaaaaataacaaatggaaagcaaaatatactcatgctgagcaattgtgatacaaaatcagatcaagctctaaatgacatgcatccctgaactaatcaatggatttgggtagtagcctggacatatgaaaatcaactcagggaatcactgtcttctttcaccagcatgacccagtttagattctagatagacagggtaagcctacatgaattacagtttggatgaaagatagaaaattaggtctggacaaatggaaggtatttcatgtcaggatacactgagatattattttaggatagttagcttcagggaaactctaagattttgaattcatcagggaataaagacgcttggaaaatggtatctgcagattttgttggagctccccacagcatataaactgagaaaatgggtgtgtctgcttcagtgagtctgaaagagagtataaatgacaaataggcatatatggtaggtccctctattaagatgcgaatgtgtgtttgttctcctcatgtttcttcctttctcctatttcatgaggtagccaggtatttagagatgaaaccatgtcagaaaacaataccatatttcacttacaggtatatgcatatgtaataaaagtatagaaaaatgtcttgaaaacgtaaaacctaaattctgcatcatggtcacctgtgggaaagaaggcagctgaggtaataagagaagactttaaagtgtgtttgactcacctatgaaagttttatatgttgacatgaatatgtagaagtctgttgtattctataattttttgtgttactttaatatttcataacaaccactatttctctgagacttaattctgattttaaaaagatc

SEQ ID NO: 334 - DNA, 478 bp, Homo sapiens
  misc_feature (1)...(478): n=a,t,g or c
ttataaaataataaaatttattcagcctcacaattactttgtgaactggaaataacaatgagttgtcattttatccaaatctaaaaaaaaacatacatacagtatcaagttctggttaaagtagtagatgaactttacgtggtacataagagtatctatacagtttgtgggctgcatcttgctagaatatattacattataaaatgcaccatttatttactctgcgatcaaacccccaacttgccccaagtggaggaaccctcagacatttgcagaggagtcagtgtgctaagtaagcagcattctttacaaatctatgaacatcaaggtctccttggaacagatgctctgtgaacaatttataaaactccctcctgttagacacttaggttgantccatttttaaatcaattactgaataaaacacactccatcgtgtggatgaaatgctaccttaanttgtcaaagctatcatttt

SEQ ID NO: 335 - DNA, 431 bp, Homo sapiens
ggtctggaaggcgcagaaatggagcaagagccacaaaatggagaacctgctgaaattaagatcatcagagaagcatataagaaggcctttttatttgttaacaaaggtctgaatacagatgaattaggtcagaaggaagaagcaaagaactactataagcaaggaataggacacctgctcagagggatcagcatttcatcaaaagagtctgaacacacaggtcctgggtgggaatctgctagacagatgcaacagaaaatgaaagaaactctacagaatgtacgcaccaggctggaaattctagagaagggtcttgccacttctctgcagaatgatcttccaggaggtgcccaagttatatccagaatttcccaccttaaagacattgtgttgaaaaattaccagagcctcagtcttttaggttcagctcc

SEQ ID NO: 336 - DNA, 452 bp, Homo sapiens
  misc_feature (1)...(452): n=a,t,g or c
tctcagtaaacattcatttatttcctgccagcaggtgcagtggggccccactgggnagggggactggtgttctaacaggagcgagaaaatgaaggaggcctggcttaagaccagacatttgaagaaggctccaggcagggaaaggaaaggagaggccaggccacactgtcccctccctgcccccacgtctccagcaacacaaggcggccagtggaccgtgaaccatttatttccaaactataaagaaacctgctctctgagaaaagacactgcccaggtgatgaagctccagcccctggaggtccaaaacccagtccaaactcagtccctttagaaagctgctgtgcctttggaaatgagtctcggctgtcagagcctgggaagtggtgggaagaaccagcccactcccctctcctgctgcgattccagcgcagtttggggcccagctctgg

SEQ ID NO: 337 - DNA, 245 bp, Homo sapiens
  misc_feature (1)...(245): n=a,t,g or c
taaaaccccatgagatatttatataaagttactcagatttgggccgacatggcttatctgaagagtgcatgccgggtaaattcagggtggcttttttctcagggtctggaagtgtgagagtttctggggcagactttttccggggccgatctttgggaacggacagaaattcgggtgcgtctgtggagagaggggtggatggagcactagaaggcgcactgcggacngaaaaaaggccccccccg

SEQ ID NO: 338 - DNA, 480 bp, Homo sapiens
  misc_feature (1)...(480): n=a,t,g or c
tttttgcaatgaagtcaggtttaattttgagattcctgtgccctcactcacgcaaggaggaagtcacctggctccagtgaacacgtgtggaacagaaatcagggccactgaaaagccaccacccacttgagagggcttgttctcaacaaacctgactcagatgggcccactttggcttntagtcagatttagagaaaacccccggctcatccaatcaatgtgcaatcaatttctacaccatggcagaggtaggaaaagccagtcacatgtccaaatgatgagtgaaaatcaaggcatcgtggagccacctcctccagagggggagccacaatctcaggaccccgaagagcagacattttcaagtggctcctttacattaagcaaaatgtggtcctctcattcgggtctgaagcatcatttgtgtgtgagcccggcccactggggacctctggctgccaggtggagagcctcctggtgcag

SEQ ID NO: 339 - DNA, 452 bp, Homo sapiens
ttttgctagtgcggagttttattggctacaaaatagatgcaaaatgatgagaatctgaaggctgcagtaggaaagtagagctttaccctcataaactcgcactttgattagaaaagtgcaatatattaagagcattatgagaagtctggtgagactgttacagaaaaaaaaaataaaagtttctgagtctgataattccaagggtatcttttagaactcactcactggtgtctgtgcaaggactttccttgggggaaaatagattttacaacaggcggaaactttcattggtctcatgcgtgcttttggatttcattcacttgacaaagaactaatcttccgttgatggtctcctgggttatggccttgatctttggagttgcagacactttcatgctcgactttgattcttcccgtgtcccttcactctctccctcccaggagccgtcggg

SEQ ID NO: 340 - DNA, 392 bp, Homo sapiens
gaacaagttttgtctgtttatttaaaaacagaatatcattttatgtacaaatatgcacatatttacataaaatgtacatgttaggatcttagatcttcaggctccacattcgaagtcctaggctggctggggaacgaaggatgggagcctctcccttaggccagaaatccagcagatttcagactaagaagagtttgggtactaaatctaggtattctggctgagtgtatctgggtgggccagctaaaaataaacctcattgaactccagccccaacccagagaaacatccagaagagccttgaattagtgatccaaaacccagggggaaaggcgacattctcacccccagcacctccttcacctcacctcaactcctactctctcggtctc

SEQ ID NO: 341 - DNA, 353 bp, Homo sapiens
tttatttcataattctcctttattaggcacaggtaaacatacatactcatggtatccaaaacctagagtatggacctgggattgtggaccccaagtgtccccagaagagtcccacctgggactttccaggtggccacaggacagaccctgcctaatcctgtccctcaaccttggtgctcaggtcagaagcccccatggttgacaggcctggccctcattccagaacagtcttgagttagacaagaactagcctcatagtttggattcttatctctggcccaaatcccaggcttaggctggaaaggagaatctcttaatcaagaggacagagatgctggggaacacagttccca

SEQ ID NO: 342 - DNA, 439 bp, Homo sapiens
  misc_feature (1)...(439): n=a,t,g or c
tttttttttttttagtcttttaatgttagccttttaatattttccaataagtgctttcaactcagcaatatacatatcatgctttcctcattattattgatccatcaataaatatacaaaaaccagaggaagggtgtgctctgaaaagtcaaagtaacaataacagtggtcattgtacagcacaagaatgaacaatgggctattctttgaaaactcaaaacaaatgatttacacaaagacatatctataacataaaggtgaatggaccatgttattcttattcttaagtacattttgcttttccagataagtcaaatgtttcctctctcctactcctctgatataacagtattgaatgaatgttggctacaaaatcaattcttggtgttgttatgaatctcaatataaaacttttggaaaggttctgctagaaaagccn

SEQ ID NO: 343 - DNA, 521 bp, Homo sapiens
cgtttaattgaaaaacctggagaatccactccatgaaaagaccaaacgccccccacccctacattacttcatagccacttcgaatactcttcaccagacagcaggagaagataattcccaagacctccacaaaagcaatgcccagggccgctgcagccaccagcagtatgttcttccttagccatattgctatagtctccacgcagccctgggtatggatagtggattccttgaaatcattcccacagcccacagttatgttgatgcagcaagaatcggggactctgtccttggccatgccggggatgttttcccagtctgtgtagttagaagctccacagcagttattttctttctgcaatttgtccaaaatagtggctgttttgttgtctttaaggtaattctggcatctgctggctgggaagctttttattaaactctgacttcacctggtctctaaacacatagccagcaatgggcacagccacctccacaagcatgataagagacaggaagatggg

SEQ ID NO: 344 - DNA, 426 bp, Homo sapiens
  misc_feature (1)...(426): n=a,t,g or c
agccttagatccaaggacagtccaaggaagtcctaagaccatggagttggtgatctgggatctgggtttgctgatatttctcaccgtgaatctcttggtggtgtttgtgggcacgagaggggcagagaatggagagtgaggctaccacatgaagcgtcaccagagctgctccctgctgcctgctcagagcaccccggatccactgttcaatctgcacaagattcggggtccagacatgggagacttcagctgcctcagaggaccgtggacagggaaggccagcctcgcatccctctgtccatgcctggaaatgactttaattaacccaagagtttttaatttttggaantttgtaagctgtcggttcacntttttaacccacccattcaattaaaccnttacaggaattggcnaaaaaaaaaaaaa

SEQ ID NO: 345 - DNA, 345 bp, Homo sapiens
gtgaaagtacgtagttgtctttcgtaagttaaaatgataattgggccgaaacttactgccttacctaaaaggcagcgcagtcaggatattggtaggtcgggggcggctttggaaacccttaagtttacaagcatgcgcggacttgagtgctcattaggtcgccgggcgtccacgtgcagccctggaccctgaaccccggcgtgcgtgggccgtgggctccggggaaaggttccgtgcactcggggactccggtgaagcctgttcagccgtctgtgtatgtgccatcttgagtctactctgtcgctcttgtgccctagaccccgagaaccgtagtttagcaaatga

SEQ ID NO: 346 - DNA, 374 bp, Homo sapiens
gaaggccagaaacctccagagggcttcatggcccccaaggctggactgtgctggtagagtactacaagtccttagagaaagcctaactgctgagctgggcactctgcctgggacgcatggctgagtaacagaggggaccacgcagccaccgacagcccttctctgcggttgtctgactggacacacttcctgaaatcaggccgtttccctccgcgtgcattggttttggtctgtctttcagttctgtttcaaactagtgtaacaccacgctggctctaatgtatcttttccacttattgttaatattcttataatacgattttaaaaatctcgcctttttatattgtatttatgcttctgtcttacaatttttc

SEQ ID NO: 347 - DNA, 447 bp, Homo sapiens
ttaaattctgcacccagtctggcaaacatttattgactgctttctctgcatagaacaaccggccagcccctggactccagaggcccaccatcattgttaagagacctacatgcatgaaccaatcacacacgtgctatgagaatagagaaaagaaataagtaattctcacagacactgacaaactggaaaaaacttctttcatcccaggtactttatggctgggatcaaaggggtgactcacttgtttgcacaggaaacaaaaggcaaaaggaagtgttggcatcagttttccatctgcacatataacccccattcctccatgaattgcatgagataggtttcattttctcctggtggcctgtctggaagccgggctcctcatagagtctagatagaagaccctcctctccgagcccatccccctcagaaggctcgcaggcctctgaa

SEQ ID NO: 348 - DNA, 367 bp, Homo sapiens
gtctgaaactttttccttttaatatggtttacattctatctccagagaaaacacacttaacagaagacagaaaacatttaacaaatccaaagcaattaaaaatagccacaaaaaaagagaataacctagactgacagctcacagagcaaggaggtggcagagacctgcccaggtgagcttggctgttgcccccagctcaatcttcctcctctcctctctctgtcccttcacctctgatcagtcccagcctgattcccgttccctgatgcctcaccttcttgctgccagatgcctctaggaactagggtccttcagactccagatgccctggcctgggcttaggacatcttgacttccccagtggaca

SEQ ID NO: 349 - DNA, 434 bp, Homo sapiens
  misc_feature (1)...(434): n=a,t,g or c
ttgcttataaaaaccattttaaattaaaaaagggaggaagcatcagtgcacacagatggggacacaggggcagagggccagcccaaagtacagtgtggtcaccccacagcccagtggacccagggcagactcccctcgcagcacagacagctgaggcccgggtgctggttcctctaggtacagctttggtccttgtgggctcagaggtctgcctttcggaaacttgctctgttcaaggagttcctgaggccgggtggggtgggtgccatcagctggggcaggcgctgggtaagcaggggctgcaganctcccgcagcggcagtagttgcgctccagctcacggtggtactccttctggtccggcccaatcagggctttatttttccgcagcgcatcctcacatttcttgcagaagtccttgaagccctcgtgcc

SEQ ID NO: 350 - DNA, 416 bp, Homo sapiens
ttactgagtgaagaaacacacaaattttatttagaaaatgaatgaccatgtttgcaataaactcccaaaatatccgccataagatggccataatattctgatgatcaaggagcacacatatacaaaagttattggattactgcaattctcagaggcacaaaacctgacatggtgtgatatagtatataatcagtcacgggggggaaaagaacattaagtctttaaaaaggcttaggaagacataaacagtaaatctttgtttttctaccttcctttggacagtgttatatttcactttcttctttgcaaaatgtttccaaattcatttgctcaggatttatttaagataataacttaaaaccactaacagttggtttatgctatatgcatatcatgcatggttcctactgggttcc

SEQ ID NO: 351 - DNA, 282 bp, Homo sapiens
  misc_feature (1)...(282): n=a,t,g or c
ttttttttttttcaagagtataatattttttattcactgataaactaaaagccaatttcttggtatttctcatgtatacttcatttattttattaataagcaaagccctgtaaggggagcctttgcctagtcctccgactcngattcatcttcatcttgactaatctggaagtaacgaagttcgtaggtctccttgtcagatgcaaccactcgaagccaatcacgaagattgttcttcttaaggtatttcttggtaaggtatttcaaataccttttagagaa

SEQ ID NO: 352 - DNA, 515 bp, Homo sapiens
  misc_feature (1)...(515): n=a,t,g or c
ttttgtttaaagataatttattctatagagtgcattcttgcactctataggtgacagaaaaacaaactgtgctttaaataccaaacaagtaaatcagaaagcttattttctatttnnnntatatctaagacacacttntataanaagaaaacagaccctcctaacatgtancattaccgttcgtggcaattgttctcaacctttcactctccttttgaccttngcattaagctcctttgctcacttctgagctctcagttacagttcttgaggtggcatcctaaccaatttgcactatctttcaggtgaagcgctggatatttaccagataattgaactcaccaaaggctccttggaaaaacgaagccagcctgggaccatagcactgcctgggnggctctgtatttgctcccgtggagcttcatcggggggtggtncaggctccccaaactcaaggcntttcaggctggtgncttttttgcaaaaaggggccttgccttaagggccagcccatt

SEQ ID NO: 353 - DNA, 292 bp, Homo sapiens
  misc_feature (1)...(292): n=a,t,g or c
ggatttaccaacacgtaggcttttatttcttcccattacatctgtttagccacagaaagcattgggccatactcactgcagaagataagacttcctcagaatcttattcgtttagtgcactcaattttacttcactgtctcatcacttgagagactggttaaggcaagaaacccatttcttaacattttttttattttcaaacatttgaaaagcaacaccaaaacgtatgcagttaattcctcaattctttcccttagnatagcactttttaaattacaaaaccacacttac

SEQ ID NO: 354 - DNA, 446 bp, Homo sapiens
  misc_feature (1)...(446): n=a,t,g or c
ggtgggtacatgggtatttatttcattgttattaattatagcttactcatgttataaatattatttggttagtaaacagcacttaattaaaaaaaacaatgtaaaagacatggattttaagattaattagaaactattgagcctgagaagcatgaaagagaaaagaatccttcgtgctgccaagtcgatctctaggggagaataactcccacggctgcagcgtatgcagtgcacacagaagagggctgctctgcccagtccatgtgggtggaagataactggggggagtaccagaggctgctgtccacttggacactggccttgagcaactcagctgctgcagccagagcgccaatgctgcatggccctgaggcaagccctggcaaatgggctgcccaggtangcttggnccacgttaaaaacagacccacggcaagccctgctga

SEQ ID NO: 355 - DNA, 454 bp, Homo sapiens
  misc_feature (1)...(454): n=a,t,g or c
ttttttttttacttgaaaattgcttctcaagatttaatctagttttcagaaaatttttaaatttacattctcatgtacaaataaattgtatgctttccggataagtgacatgtttatatggtgataaagggaattataatgctcttaactcttatgtagtatgttctcatcaaaatcaccaagcatgagaacactgtttagtctcattcatcactcagcacagcctctttctgtccacttcagggccaagtctttgccatggccccacataacgtgtaaattagcttcagggatcaaaaatctttgaaaacccagtttgctgagccttgaaggaagcctttagacccagcttcaatgaagtcacagctccctgagggtcctggtggactggaggcggcctcccaagcctgggagctgtgtgcctggatggtctcactggggtgatgacncaagn

SEQ ID NO: 356 - DNA, 491 bp, Homo sapiens
  misc_feature (1)...(491): n=a,t,g or c
tttttttttttttttgaaacaggagtgctttatggtctgagtggagtgtttgggaggagtgcctcccggctcctgccttcgggctcacctgagcgggggcgcantgaggccactgtgggaaacacaacccccactcccaggagaggcctcacatgctgccttcggtctcgccagccttctagcgtggggcctgggcgccctttaggtgagtctgcacacccgtgttcagggctcccggccggaagcggaaccataggcatgctgcggccccagatgagcgcggagggcaagcaggtgccggggnagcgcacaccccacagccaagcggcccctgcccagcctctntaaacagaccctcacaggtccctcctgggcctcagtcacatccctnagaaanactggcggctctgcccgagangccagggtntccaccgagcctggctgaagcagctgtcccctcccttnttgcagagaggctcaaatgggcctga

SEQ ID NO: 357 - DNA, 177 bp, Homo sapiens
  misc_feature (1)...(177): n=a,t,g or c
ttatttttaaaaaagactttattctctagacaagacaatgaaacccatcttccttgtatagagggcaaggaaagtttgcataaacgcagaatgtttcagcagctttgggttcactccatggctcattttcttcttagcaatcagncatggtgaacttggaggacccaaaagncatta

SEQ ID NO: 358 - DNA, 476 bp, Homo sapiens
tcacatttgtatgtgtcatttatttcggttgcgctggggaaagagaacgcagtttctctccccgcctcctcctcgctgggtagaactaactctaaaacaccaatatctcaacactgaaccctcccaaatcgcaagagttttcttttccccttccttgtttttctttttaagctgattggcttttgtctatcttgctctttccttttctttttcgtctctcccccgcctgtgttggggtattttgtggggtttttgtttttcccctggctgtgctgaggcagcaggctgggtagggtttaggactgctccttgtcggttttctctttattcatctttttcatcttcatccttcgattctgaaaccagattttgacctgccgctcggtgagattgagaacccgggccacctcataccgacggtccctggttaaatacatattgaagagaaactccttctccagttccagcgtcaggta

SEQ ID NO: 359 - DNA, 264 bp, Homo sapiens
aagatttttttgtttatttggtatggggtcttctgtagctcacacaaaattattgggaaaataaataacccaggggagccccctttgcccacggttcctaggtcgcggagtcacagcagccccaaaggcgagggacctgggaatccgaggggtcccggccctggcggtcacttgcccagcaggaggccggcgcgcacacgcggggcacgcggcggatggtcagcgagacccgggtgccgcgcacaggcaggctcccggccgcgc

SEQ ID NO: 360 - DNA, 419 bp, Homo sapiens
gaattacaaattgataatttattaacctgtgcagcaacaaataagatttttcaaaactcaacaaagtgctcaaagttgacattacttgcttcaaagttagtttaaggcaagtaaatactaactactgcgaggtggaaaattgcatgaagaccctgcaacgtcattcactgaggatcttctcatccttttcttttttatctcgtgccccttgtctatttcaaatcatcaggcacattcatttaataatttcccaagcaatttttaaaaagacgtttgggagtgtgtaaaagtttagtgactttcacactaaaacttgttgtcagaggtacatggtgactatctccacacaggcagagctgggacccaacttactaaaccttcacgtgagaatcttctatttttaaggctgaaggatggca

SEQ ID NO: 361 - DNA, 472 bp, Homo sapiens
ttttgtgaacatagcagaggaggtttaataggataagtcagctacatttttaatgttatcaacttatcattaatgtgtatacattagcgccctactgaaaggaagtaccagtctttgggcaaaacttaagagattccttgaggaacctacggcctgaaccttaaaaaaaaaatctctaaagaccttacagtctgctgctttaccatttcattttaattatcaacactggagttgcaattggctaagttgtcaactgtattttaggagtctaccaatgtggcactcagaatcggagtgaccatcagtgacctaaagaggtaagatttgtggaatactttagtccaaaagctttaaaaaactattagaccatatattctatgtttttaaagtgaattatgcataaaagtctgtgcaaactacaacatgattgcagtaacattctcaagaaaaaaaaaaccctagtatactttag

SEQ ID NO: 362 - DNA, 314 bp, Homo sapiens
tcgtgtgtaataaagtggttcaaccatgattaggaactgaaatttagtagaagagggaaaaggagttaatgtaacaaattattttagctacaaaccccggtaatagagcacttgggggatgggatggggtgggttggtgagacaatcagaatggtaaattgattaaatgctcctaaccctgtaattttgtgcatagagcaccctatgctgtggaaataactgttcttagatttcattgtaactggactgttcaggttgcccagaggaatagaacattcctaattctaataaaataaacttttattttgttattc

SEQ ID NO: 363 - DNA, 454 bp, Homo sapiens
tttttttttttttctcagagaattatttaataatagaattaccatacttttggcgcaaatgtgtccaacaccaatgtgacaagtacatatatcagaatcactctttcctcagagaatcacaccttcccttggctctgcatgtggatccaaatcaagcctgggtgtgtctgacaataccagggcacggtttgcttcccggccctccatctctactgtttggctacagcttgagttcactaggcatcggctcccctctcaggccagccagcaagttgttagctgccaacaaggacatggtgttgcgggttctgtgggtggcactgccaatgtggggcagaatcacacagttcttcagggtcaggagagggtggtttgtaggcagtggttctgggctcgtcacatccagtccagcagctgcaatcttaccactgggcaaggcctggtacaggtcgtc

SEQ ID NO: 364 - DNA, 425 bp, Homo sapiens
tgaagcccaacatttaggttttaaaaatcaagcgtataaatacagaaggtggagggaacttgttttagacacagttcaggtgaagaaagacctggaaacttctgttaactataagctcagtaggggctaaaagcatgttaatcggcataaaaaggcaatgagatcttagggcacacagctccccacccctcttctgcccttcatccttctttcaatcagcagggaccgtgcactctcttggagccaccacagaaaacagagccctggactcatgaacgaatccatgccaggcaccagtctcagccacagtcacatccctttaaactggatccacacagtaagaggactctgaactcccctgcagactgcgaagtcagcctcattcactgctaagtctctagcacctgggatggggcctgatgtgt

SEQ ID NO: 365 - DNA, 411 bp, Homo sapiens
tttttttggaaataaacaagctttattttcagtttcaacaggtaaggcgatacctgcttcatcgtgtgcttttatgtaaatgccaaatagcaaaataacagctagaaaataaacagtttgtcagtttggagatcaagtactttatctatcttgagtgttatctatcttggaatttagccaggcctaaaagtagcggaagtgtcaggaaatgctatagagagccaatctccagctgcaggttggtgggcctggcactgaccagatgcgggtagctcaaagcaccgagcgatgcaggcgccgtttctgcattgcctgcagcctcttctgcctctcggcaaagttgttcttcggggtctgcttcagtgcgggcaggatggcacgctccgccacaggtgggctcagaagcaggca

SEQ ID NO: 366 - DNA, 261 bp, Homo sapiens
gcctagaacagctaagaccacagggttcagcaggttccccaaaaggctgcccagccttacagcagatgctgaaggcagagcagctgagggaggggcgctggccacatgtcactgatggtcaaattccaaagtcctttctttatactgttggtggacaatctcagctgggtcaataagggcaggtggttcagcgagccacgcagccccctgtatctggattgtaatgtgaatctttagggtaattcctccagtgccctttaa

SEQ ID NO: 367 - DNA, 388 bp, Homo sapiens
caattcctatgtattttattttatgcatttaaaaaacattattctaggccgggctcagtggctcatgcctgtaatcccagcactttgggattacaggtgtgagccacacgcccgggttaagaagagttcttgaggctgtgataagcttttctcaaattgtttttaaagccagctcatttcctgtgtgctcatagtatcatagtataatcagtgcactatcctcatatcctctaattgaaggatttttacggaacatgaggtcttggcagaagccctgcatttgttcactgttgttttccaggagagatatttgcagccactgaggatggtcaagcgcattcaccagctctgaaagccctgacacaggggttccacatagatgcaggca

SEQ ID NO: 368 - DNA, 591 bp, Homo sapiens
gcggccgctgtgacgtgccggtaacgagctgcagccgccgccgccagatccacgctggctccgtgcgccatggtcacccacagcaagtttcccgccgccgggatgagccgccccctggacaccagcctgcgcctcaagaccttcagctccaagagcgagtaccagctggtggtgaacgcatggcaactgcaggagagcggcttctactggagcgcagtgaccggcggcgaggcgaacctgctgctcagtgccgagcccgccggcacgctttctgatccgcgacactacggaccagcgccacttcttcacgctcagcatcaagacccagtctgggaccaagaacctgcgcatccagtgtgaggggggcagcttctctctgcagagcgatccccggagcacgcagcccgtgccccgcttcgactgcgtgctcaagctggtgcaccactacatgccgccccctggagccccctccttcccctcgccacctactgaaccctcctccgaggtgcccgagcagccgtctgcccagccactccctgggagtccccccagaagagcctattacatctactccgggggcgagaagatccc

SEQ ID NO: 369 - DNA, 299 bp, Homo sapiens; identical to SEQ ID NO: 34
  misc_feature (1)...(299): n=a,t,g or c

SEQ ID NO: 370 - DNA, 203 bp, Homo sapiens
  misc_feature (1)...(203): n=a,t,g or c
aacagtttacttttttaatataaagattttncaatttacacttgtaggagtagaaaaaactaatatgctaagnctgtaagctacgcagcaaaaataatgatcttaatgaagccagaattctgtgaaaatgtgcaccacactgcatatatagtagctgagtaaatgtaaaccatgngcttattaactcttctatataaaatatt

SEQ ID NO: 371 - DNA, 545 bp, Homo sapiens
tttagcattaataatttatttattcattcatttcaacaaacatgtattagttatgttacatacttttggaagacctgaattgtaaagatcaaaaattatacacagaaagacttctgctttggggcaggatgtgataggccaatactcttacctgaacaaatggaaaatattaaaaaagtcattttcagaagcacctgagagctgtgaaagcaacgaagactaagtgaactaaaattccagagagagaaagagagaataatttcgaggtgatctgatgattgctggctatttttctctcaggacattttgttggttctgggagtactgatggtttgggcttgaccaggtagagggactctgctctgcttttgcagtgggtacaggcatcttttctgatccgggagtcagaatgacactaccagatcactgagcgttggtctctaggtgtgaccgtggtagaattgagtccttggcgatctctgattcttcatgtcaacagcttctgaaccaaattctagggcacactcatcagattagccaaggct

SEQ ID NO: 372 - DNA, 332 bp, Homo sapiens
caaatattaagtaaataatttaatgatagaacactgaaatttctttagacacagtattttcaagttatatttctgcctggagtacagatatgaaatagcacaaactgtactctgaattaagcaaacagaatgaataaaaaaaaaatattctcccaacctaagtttccgttcctcatttccacttgcctcagactctttctattgaacatatctagttaaatctctaatggacggcctgtgggaagatttactgccaacagggtatgactgacttctttccggacactgagcaggggactgtgggctctgaagcagtttacttcctgtggaag

SEQ ID NO: 373 - DNA, 142 bp, Homo sapiens
caaacctggcgtctataccaacatctgccgctacctggactggatcaagaagatcataggcagcaagggctgattctaggataagcactagatctcccttaataaactcacaactctctgaaaaaaaaaaaaaaaaaaaacc

SEQ ID NO: 374 - DNA, 414 bp, Homo sapiens
tggggtaaagtttaatggaaaagccgtggaaacgttgagttcacaaacaggacttcccgtgcaactgtccagccagacctggggcagctcctggggaccctgcccccttcacacacacccatcccatccatggtgcctgagaggccttcatcttcagttccctccaccagatcagttgggcatgttgggggcagagatggagggttgttgaatcacactaggctctgtaagctgagaagacgatcctgcacagggtggcgtaacagtctcctcctgccagggcacctgcagggcgagaagtcacatgccagactgaggcatgcttgcgaacactagcctggccccagcagcagggggtgctggaggagctgcagcttttccccatcttgctgaattattgatgggcctggcact

SEQ ID NO: 375 - DNA, 528 bp, Homo sapiens
gatatcattccaggctttaagtttcttaaggagcaaaacagcttccttggtcttcttgtagccttcaactttatcttcaactaccaaaggaagttcaggaacttcctcaatacgatgacctttagacatgaccagtgctggtagggctgaggcagccagggcagaacagatggcgtatcgtttttgggttgtgttcactctacgatgccaacggcgccaggttttggttggtgcaaacattcggccttcacgacacatgtttccaaaagcaccctggccagaacggtgagtcccacaacctcaaactctggggaattccgagcacagctctgccagtaccccaagacttagcactagtctgaagacctgctaattccatgacagcatagggctgtctggtgtttttgcgcaagttggtgtgaaccaagttcacaatatctggtccaataggaaccctgaatacagcaggcaaagtggcatttttgccaaatgacttccccttttcggagttcaccggtattagttggc

SEQ ID NO: 376 - DNA, 207 bp, Homo sapiens
tttttttttttttttgacggttcctatataacgtttatttctggaagttaaagtagatacagcaatataccaaaaaaaaaaaaaaaaaaaaaagacaaaaaacctcacaataatataaatttttacactatgaagtacacattggaatttgaatgcagtggccaggacagcagcttataaaccaccttataggtaggtaagcaaccc

SEQ ID NO: 377 - DNA, 278 bp, Homo sapiens
tttagcacttgaacttctgactttattatttttcttcaaatgaacaggtgataaaacactgtgtccaaagcaaaatgcatgactcccttttctcttctttcacagagtaccagaaaatgtaaacaatatttagcttgaacttctgagtcctcatcttttttttaacagcctttagaacaacattaatttgtttgtttatactagcattttacaacataaaaaataaaataagcagactgtctgagggggtttatataaggttttcagattctgataca

SEQ ID NO: 378 - DNA, 183 bp, Homo sapiens
tcaggggtatgaggctttattcaggaagagctcaagatgtgaggggagcccctggggtcccacatcttgtggcctcttgataccaaggctcatgggacgctaaaacctaatgactgcaggcatctgagcttccttggagtcatctgtggggggcacaggggcagcctcagagtcacccgtggg

SEQ ID NO: 379 - DNA, 438 bp, Homo sapiens
tttttttcaggcatattagctttaatgtaggtggcgatgagtttttaggccaaggaaggaataatgttttatgtaccaaagccttttgtccccattttccatcatacgaatagtattccctgttgctaagccgatgatacattacccttttcccataggtgtgagtggcggtctgaatggagaagttcaatagttctgattgcagatcctatgcagaagagataataaggaaaataatctttgtctcctggattaagctgaggctggcaaagagtgaaatgtcccaagccctctaacaacaaacaacatactttgtgttgtcctggatgctggtctggttgccaaatatgtggaactggccccatatgcgtgtactgttgtccatttcatgagagtaggcttgaggacaccatgggcaaggatctgatggttgccagc

SEQ ID NO: 380 - DNA, 465 bp, Homo sapiens
tttacctgttgaactcatttattactttttatggattctttagcattttctatatacaactatgtatcaactgtgaatacatatagtttcacttcttttgcagtataaacctcttttctttattagcttatttgatttttagatgttgaacaaaccttgaattcctaacctaactgctgtggctagaacttcaagtacaatgctgaatagaagtagtgccgagtgaacatccttgtccttcttcccaatcttaaggggaaaacattcagccttcagtctatcaccatgaagtataatgttaggtgtgggcttttcatagatgttatatttatcatatctaggaagattccttttattcctaagtttgttgagtgtttttatgaaagagttttggattttatcaaatgctgtaataagacaatctgtgtgggttttgtgctttattaaatatggtacagttgatcc

SEQ ID NO: 381 - DNA, 418 bp, Homo sapiens
gaaatgtaagtatacagattttaatttatttttaagaataattgtatattttaaaaacaggacacgtactgtatgagtaaacagcgtggctaacaccaagtccacactggtaagcttttgagaaccatttacactatgttgacagtagtactgctgcaggcagacagcggaagaataaataatagtgcttcaagaagagtagtgattgagaggataggtaaagagggcgcctcatcgtggaagctagagcaggaacacctccccagtagtgacatgtgcaaagttccagatctccacgacaaagacagctcaacccactggaacaaacagactcccaatgtggctggcaactgcgggggtagaagaactcaggcaaagtaggcacaggaatgggggagatgagagccaagggacaaac

SEQ ID NO: 382 - DNA, 359 bp, Homo sapiens
tttaacaaattgtattattacacattcctagttgctgcttgtaatagaacagatttcaatctcagaaatgtttatctgagagacatagatcaggtttacaaggacaagaggtcaaagtcatgccacagacgatccacaccacctatgtatgcactctctctcttgcacacacacacgcacacgcgcacacacacgctgagtctcatgtgcttacctcgtctgactgccgctggtgttatatgtagcttccatgcctggaagaggcacatatggtaacatggtgtggctaaagtaaagcaaaagtacaaaagcaataggtaagggcagtgggataacaggaaaggttttgatgttattgt

SEQ ID NO: 383 - DNA, 398 bp, Homo sapiens
gtatttctaaaaccattcaaggctccttcattaattggcttccccccaaaagaaagatttctttattaagaaataccagagagtgaaaaacccccaacacatacacatttgtaggctcacacaaaagtgcagagatttacatattaaattgcatttaaattagaaaatagatttaaaaacaaaatactttttttctccaacaaagtaaagagatttggtcagtaggaacgggtgctttatgggtaaaggcaggatggtcaggacagggagaatggaatttagctgctacggaatcagaatccacctctaacccaacctcactcctggggtaaaagcaaaggaggagatgatgatctcagctagggccaggaaggctcagagctgaatggacatgaaga

SEQ ID NO: 384 - DNA, 448 bp, Homo sapiens
catgaggcttatttattttgataccaaaaccagacattaacagtaccaaagaggaaaattataggcctaaatcacttgtaaacatagagacgaaaatcccaaatcaaaagcaatatggagctagtaataagtcttttaatataaccacatttccattgttatatctcaaaatactaccagtaattcaatatccagtatacaatcagtattcaaatatcaccgaatgttttccttttttctgtttatccacacaaggtttatatatatttaagatatctcttagtcactaaattaggcttagcgtggtgcctcacgcttgtgatctcagcagtttgggatcacagccgtgagccaccatgcctggccctctttttcttttcaatttatttgttgaaaaatgtggacttgtatttccagagtttcccctggtgaaattttgatgattgca

SEQ ID NO: 385 - DNA, 490 bp, Homo sapiens
ttttttttttttttagacaaaccacaactgtttattggtgaaagactcagcttcctcatgtgctcgctgcaaaataaataaaataccagatgctagtatcgtacactatttacaacctgcagctgaccaagcaggtcctgaagccttctctgtggaccagtactgcactcttctgaggctacgggagaggtccagcagccgggccagggactaaaaggaaacgaaggatctgttttatttcgagctcgggggcaggctgcacttctcgcagatctgaacgggcagcatgtgagtcaaggaagtactgtttatggccaccagcagctgcaacttgcccatacagtcctccagcgccgcctccgggtggtctcccagtcgcaagtccacgggccgcgagaccccagcatgctccgccagcgcaggcagcagatcgccggagggaaggggatagctggtgaaggatagtcggccaactcagtttgccaccccc

SEQ ID NO: 386 - DNA, 366 bp, Homo sapiens
atcttgtttttctgatcggagcatcactactgacctgttgtaggcagctatcttacagacgcatgaatgtaagagtaggaaggggtgggtgtcagggatcacttgggatctttgacacttgaaaaattacacctggcagctgcgtttaagccttcccccatcgtgtactgcagagttgagctggcaggggaggggctgagagggtgggggctggaacccctccccgggaggagtgccatctgggtcttccatctagaactgtttacatgaagataagatactcactgttcatgaatacacttgatgttcaagtattaagacctatgcaatattttttacttttctaataaacatgtttgttaaaac

SEQ ID NO: 387 - DNA, 412 bp, Homo sapiens
ttttttttctagtcaacaattttattttaaagtttttcaaaatacaaaagttagcaaaaagctgaatatttacaattatgtcataggttactattaacagtgcagaggatagagtatgtaagaaagactttgaagaggaaataatatacaaagtacaataaacagcaaggttacatgtcatcgttttgccaccgtacagaagtggaaagtgccgacctggagaggtcaccgttgtttcatttctctgtatccagaaaggaccgtctcttaaatccaccaggggaggaaacagcctcctgtggaaaatgctgtcttctcaggagcattgtatctgcacgtgccaatcacagttcctcctccgttcgcaggtactgggtacagttctgaaatctttttcagctgagcagcgttt

SEQ ID NO: 388 - DNA, 290 bp, Homo sapiens
aaatacaaatgttttattacgcaaaccacatgtaggtcccaggctcaggggcttaccctacagcccccactggtccctggctccaagcctgctccttgcccttgcccaccctggaaagccaggatctcctatggagtgtgtaggtgtccacgagtgtaccggtgtgcgggcctcctgggctgcaggcactcaggcatggtggcagcattgagggaaagacaggtgttggggagcggggtcccacctgcccaggctcaggagtcacaggggtctgcacagtcctttctgct

SEQ ID NO: 389 - DNA, 255 bp, Homo sapiens
ttttttttttgatttgtttacttttattatcattttttaaatgtggtcaggggttttatagtattttttgtttaatctttttggttattgaaaaaaatagaacagtccactgtccagcagaggctgcttcaactctattgctcgcagggctcattctgcatggatctgtgtttcaggatgctgcaaggacaactctgcgggcaggaaggcccttgacccaacgctgtagcataggtcctgctctgtggatgggga

SEQ ID NO: 390 - DNA, 338 bp, Homo sapiens
agcccaagcataggcaggcttctgactttattcctgtatctacctgcatatatacatggtaaaaaccatgggtttacacagataccttggagccaacccaacaccaagggctttccttggcctccctctggctctcactgtccgatgcagattagatttacctgtgtggtcaatcctcgtgtgtacatacatttcagaactgctggcctggacccatgtgaaaaacagtcaccatctacagcaggggtgtccaagcttttggcttccctgggccacactgaacaactgtattgcaccacacataaaatacactaacattaatgatgactgatgagtta

SEQ ID NO: 391 - DNA, 448 bp, Homo sapiens
ttttttagcacttgaacttctgactttattatttttcttcaaatgaacaggtgataaaacactgtgtccaaagcaaaatgcatgactcccttttctcttctttcacagagtaccagaaaatgtaaacaatatttagcttgaacttctgagtcctcatcttttttttaacagcctttagaacaacattaatttgtttgtttatactagcattttacaacataaaaaataaaataagcagactgtctgaggggtttatataaggttttcagattctgatacaggcttgcatctgcatcgtttttagtctgacaaagagaaacactgctttaggaagtgggtcatgtgggtgtataagtggttcgtggacaggccggataagccgtggttctggtcagagtaccacattgcctggaaatccacttgtgcattaaccagagctttagcaatc

SEQ ID NO: 392 - DNA, 490 bp, Homo sapiens
ttttttctgaatgaaagctaattccattcttttatttcctcataccacaaacatttcaatttatctgcctttttacaacctgatttacacaagcaaattgcaaacgaaaaccaggcattctttaatcatccaaaatgcatgtataaaatatagaacaaaccctagtatttaaacataaacagggttagctgaagcagctttattgcaatctcttcaagttagcatattacagtttaaatatttatgcctgtaaagatctgcataatctacaatacagagttatttcagaagcagttgacttaactagttgagaaaaaaaaacaacaaacttcaacgcaaagctataataatttatccgaaacttatttacaattaaacatttagggtcctgatttacaaaactcagtgcctttcatgatttattgatgagttttatagagaaagtaagcagtatgtagaatattccccaggtaaaatctggagtgaatgg

SEQ ID NO: 393 - DNA, 379 bp, Homo sapiens
ggaggaggcccctgtgagcccactctggaacccttcctggaaccctccctactctgtccccctacagacaaccaagcactaatccccttagtaccaagaaaggggagccaggatttagtcctggcccagcccagagctgggacctggagcacgatctgttgacttccctgggtaggacactgccacctctgggctcaggtcctcatgcctccaaatggcatctagagtttgagcagccttcttggctgaggcaggcctagcctgtggagcgggctagggccaggagcatttggtgcccctccatgttgcaatgcaaacaccttcaccactggggcagtggggagagatggctatattaataaaataacgtgtgtctttc

SEQ ID NO: 394 - DNA, 380 bp, Homo sapiens
ctttacttaaaattatttttccttttagaaagttcaccaggaaaccagctcccctcccaccacgccgggcaggcacagcatctttttaaaatccgcgctgattttccctcacacccccaaacaggaactcctcaggatggcctcagaaggctggagtctctccctgtctggcgggacaccctggtggcggtgaaggcccctctgccacaacggaggtttctgattgtgggacacagtctggtttttgttttcttcctgtcttctaattaaaaaagacattcctgggtgacaggcacagtgcaggagtgtgagctatcgaaacaacctggtgaagtctcgcaaggcccagcaaacttgtttacattcctcagcactagtga

SEQ ID NO: 395 - DNA, 400 bp, Homo sapiens
acagatgaggagcctgaggcatagagaggtttattaatttgtcaatcaaaaagttccaagtttcaaagctgggatgaaaagccaggtcttctgacttgcactctgtcacactggatttttcctctgatccagctgcagcctcccataagaagttcactcttaatttcatgtcccatgctttgtcttggtccctgtgaggaaaggggtcagctaaaggtaactgttctataaggatgggtaggtatcctggcaagatatttcctctgaaatagtaaacgtgaccttagaagttactgtctagggcactctcagctgaataaagtctcccaaggaaacactgaggtagagcagtctgcaagtgcaaaagcacaccttctgcagattccctacaaagtggggt

SEQ ID NO: 396 - DNA, 354 bp, Homo sapiens
ttttttttttttttttagagatcataaatacttttaatatcagataaatcattaagaaattgcattctgtacttgatgaccacacgggaaccttgctagagtcaagagaacttgtcactagtaattatgaagacacctttacggtgagcgttattaaaaccctactagaggttttgggtgggactcaagagcaaggggtggccacctgtggacgagggttccctgttgttaacagaacacgttgcccacctcgcaagtatgcagcccaatcagtccccagggtctcggttcccgttgcgcccttccccatggccactgcgctcattcatgagcctagggtgatcaggcctccgg

SEQ ID NO: 397 - DNA, 460 bp, Homo sapiens
agaaaagccggcataaagcacttttattgcaataataaaacttgagactcataaatggtgctgggggaagggtgcagcaacgatttctcaccaaatcactacacaggacagcaaaggggtgagaaggggctgagggaggaaaagccaggaaactgagatcagcagagggagccaagcatcaaaaaacaggagatgctgaagctgcgatgaccagcatcattttcttaagagaacattcaaggatttgtcatgatggctgggctttcactgggtgttaagtctacaaacagcaccttcaattgaaactgtcaattaaagttcttaagatttaggaagtggtggagcttggaaagttatgagattacaaaattcctggaagtccttatgaaaaccccagggttgaaaaaaaaaagggccccaagagggctccgaggtctctgctgtgcccggggcagatacc

SEQ ID NO: 398 - DNA, 404 bp, Homo sapiens
ttttttttttattttcacttttaatgatcttttacttaataataaaatgaaaaataagaatataggaatacatacaatctatatacatatatttattgcaaatacttaaaattcttatgtaaaatgattttctatatttgtgaaaaaatatgactttttaaatggtgttgacaccaacttctctgtacataccctcaattccaatgttaacaattcctttaaaaaggcaaaagacacaaaagtttagcatttaccaaaccagtctgtacaaaccttacagccagaagggaaaaaaatagcttgtggtaaataagtcaattttcttttaaaataaaaaataaaccccaaaactattccccttattgcatttttctgaaataatctgagtgtctttagagtaactt

SEQ ID NO: 399 - DNA, 435 bp, Homo sapiens
ttttttgaagggtatgtacttctattttttattttctacacaagtgaattcctgattagacattttattgagacagaaatgagtgtatataaaggaagaaattctaaaatatttgttcattaagcccagtgacttgaaaataacctcaagatcaattaaaatataggaagtagagggagccataagttgtggtatgagtttaaaagaccacatcacagaaaagaaaaagattttttttaaagtatcaacaatagaaattgttctagaagtttatgcgcaggaaaattgggaagcccatgcttcccaattttcattgtgttttaaaaagccatgcatacagctcttgctctttgattttcccaaaatgaatctggaagcctcgaattagcattaaatggaataatttgtaagtgccccctcccctcagacacttac

SEQ ID NO: 400 - DNA, 465 bp, Homo sapiens
ttttttttttttttagaaatatatattccactttattagttagaaaaaatcatttaagccacatggtgcgcacaatgtccataacttgagcaggctttggcatcccaccacccccttcagaccaatacacactatgttggaggaacgactttaaaatgtaaaatgagaaatgggcactgaacactccatcctcactcccaacagcccacccacacaacctcttcaactgctatccaaacatggaggagctcttgtggaagagaggctcaacaccaaataattgagcataagacattcaagactaaaggaaccccagacagatgtttaggaagtagggttgaaaatatcaccatctcccaacagctgaagttgggacatctaagagatgtcagagccatactgctgaggaaagcacagcatacaccagaccccggggtaagggcgagatcaacctatctcatagcc

SEQ ID NO: 401 - DNA, 397 bp, Homo sapiens
  misc_feature (1)...(397): n=a,t,g or c
ccagatgttgagtgaccagctctgtggccctgtgtcgtcagaggcttgtgattaactgtggcggcagacacnagcttgtccacagcttgggccaggcttcccctgtcctcccaccggtcggctgcttggcaaggctgttcaggacgtgcacttccccaagtcggcactgagtggcccagcaccgcctagccctgccaccccactgccctcctgggcttctgctggatgggcacctggggggttctggtttttacttttttaatgtaagtctcagtctttgtaattaattattgaattgtgagaacatttttgaacaatttacctgtcaataaagcagaagacggcagttttaaagttaaaaaaaaaaaaaaaaaaaaaaaaaaaaattaaaaaaaaa

SEQ ID NO: 402 - DNA, 337 bp, Homo sapiens
tatccaaccatttataatctttattctataattctccgccagtgctagaattttcttcccaaatggcctcaattcggacactgaataaacgataatgaattttttaaagctgtgcttaaatataaacaaaataaaccgctaagtttttctggctccaagcacgccatatgaagcacgccaatgtcacttatgtgccctgatcacattcaggcaaagtgttcttcactttaaatactcctgtgttccattattgtttaagtaaaatcctatttcaaatgcctttgataacagagaaaccgcctgtagacaaactctttgaaagtgactgaattaatgt

SEQ ID NO: 403 - DNA, 372 bp, Homo sapiens
ttcttttttttttttttttttctcatcaaaacatgatttattaattttaagcaagagtaagcatatgtgatagtggccagcttggggatagaactcttcctggttgatgcacagttcagcacctgttgggtcttggctgttgggatgataattcttttgggtgaggggaacagccgtggtcaaggctgcctgcacccccatccaggcacaggaccctgggcaaagtctcaaaagaggtagtgtttttactttcgcaccaacaatacaacataagtattgggtacaaaagaggagatttccttcccctctacctcaacgggcaaaaggccttccatcttcagaagaggcttgtgaggaccatcggttgatgac

SEQ ID NO: 404 - DNA, 280 bp, Homo sapiens
gaccagtttcaccatcttttttattggatacagagccataaattctctgatgcccatgtgagtccttttaaatacatacactcaggtacattcagcaaagggcatcttacgggtgacatggagcaaagtgctgggatggcgatgcctgggtggggcagagaagtgtggccagggaaggccccctgggcgctggaggtacaggcaccacttcagaaacaaaaataaaaccaaaaattgctctccacccctctgcctgtgcttggggctggggaagctaccc

SEQ ID NO: 405 - DNA, 467 bp, Homo sapiens
gctctgtcaggctggtggcgttttggtgtcttcgtttgttatggccgctgctgtcgctatggagacagatgatgctggaaatcgacttcggtttcagttggagttggaatttgtgcaatgtttagccaacccaaattaccttaattttcttgcccaaagaggttacttcaaagacaaagcttttgttaattatcttaaatacttgctttactggaaagacccagaatatgccaagtatctaaagtaccctcagtgtttacacatgttagagctgctccaatatgaacacttccgaaagagctggtgaatgctcagtgtgcgaaatttattgatgaacagcagattctacattggcagcactattcccggaagcggatgcgccttcagcaagccttggcagagcagcaacagcaaaataacacatcgggaaaatgaaaaactggatacaaacgaggcacttaatacat

SEQ ID NO: 406 - DNA, 448 bp, Homo sapiens
gtttgaaatatggcatttattttacaatgcacatattaggtcgaattgtaacaagcattattttccctactcttctagagtatgcacacaggttactctgaatgcaatgcaataagccttttccaccagctttaactcaccttctgtaccaaagggcaaacctaccactatggcttgtgatggcttacaaagaaaaactgaagcatagccttaagaaaaatgctgcaagatgtgtctatgaagagcactgcagtgagttgttagggcaaggggcacatggccttacataggctgtcccaggcaatgcccagcctcatcctgtaaggaagtcggaagtctccgctttggaaactagttagctcacactcttttcgggtttgttttcttctgggcactcctagttttaatgttcttcttgggactggctggtttgggagcaggagtcttt

SEQ ID NO: 407 - DNA, 308 bp, Homo sapiens
ttttttttttttttttttttttttttttttttttttttttttacatcccaaacaggtctttttatttaacataaggccaaagaagctatcaggcgttgctgaatactgtccactaactgtacaaaatattgactgcatgcctcgcaaacaccaaaatatccgctggaatgccatagaaataaataacttctgctataaacacatgaaaacatatcaaactgttatctctttaaacatattgtaaataaaaaaattaccagtacttctacacaataaatattaagaaaccattgacatagttgaaatgc

SEQ ID NO: 408 - DNA, 426 bp, Homo sapiens
ccatttatttaaaacttttattaacgcttgaagaaaaataatgcaatgtgacaatgtacaggtcctgttgcctaaatccgtagtagaaacagatattatcacttagcaagctcacgtggtgccaattctgagatcagacggggttgttcctccttaggaagtggccactggaagcattgtttttccatgctatttccgtgaagccttttgcttggttcgagtttaaatttctccctttgtgtgagtatgactatagttctggcctggtgttttctatttatttagttttagatgtcagcattttactatacttggtcctctcacttcagaataacagggctatttattgatacaaaggagaggtgttcagatcatcttgttaagatgcagagctcaaaataaacactaaatctttatttggagatc

SEQ ID NO: 409 - DNA, 1201 bp, Homo sapiens
agtcccagctcagagccgcaacctgcacagccatgcccgggcaagaactcaggacgctgaatggctctcagatgctcctggtgttgctggtgctctcgtggctgccgcatgggggcgccctgtctctggccgaggcgagccgcgcaagtttcccgggaccctcagagttgcacaccgaagactccagattccgagagttgcggaaacgctacgaggacctgctaaccaggctgcgggccaaccagagctgggaagattcgaacaccgacctcgtcccggcccctgcagtccggatactcacgccagaagtgcggctgggatccggcggccacctgcacctgcgtatctctcgggccgcccttcccgaggggctccccgaggcctcccgccttcaccgggctctgttccggctgtccccgacggcgtcaaggtcgtgggacgtgacacgacctctgcggcgtcagctcagccttgcaagaccccaggcgcccgcgctgcacctgcgactgtcgccgccgccgtcgcagtcggaccaactgctggcagaatcttcgtccgcacggccccagctggagttgcacttgcggccgcaagccgccagggggcgccgcagagcgcgtgcgcgcaacggggaccactgtccgctcgggcccgggcgttgctgccgtctgcacacggtccgcgcgtcgctggaagacctgggctgggccgattgggtgctgtcgccacgggaggtgcaagtgaccatgtgcatcggcgcgtgcccgagccagttccgggcggcaaacatgcacgcgcagatcaagacgagcctgcaccgcctgaagcccgacacggtgccagcgccctgctgcgtgcccgccagctacaatcccatggtgctcattcaaaagaccgacaccggggtgtcgctccagacctatgatgacttgttagccaaagactgccactgcatatgagcagtcctggtccttccactgtgcacctgcgcgggggaggcgacctcagttgtcctgccctgtggaatgggctcaaggttcctgagacacccgattcctgcccaaacagctgtatttatataagtctgttatttattattaatttattggggtgaccttcttggggactcgggggctggtctgatggaactgtgtatttatttaaaactctggtgataaaaataaagctgtctgaactgttc

SEQ ID NO: 410 - DNA, 513 bp, Homo sapiens
  misc_feature (1)...(513): n=a,t,g or c
ctagaagattaaatgtagcaagaagtggaagagaaacacagtttataagtcatttaataactataattgcatagaatttactcacttttcaaatacttattctgaatgaataccaaatttgtgaaacaaaatatattctatggtgcttagaatggttgttaaatggtgagttagtttnccaagtaaaaactttacgtgcattaacagaggggaatgcataataatcctatgaggtaggccctattatcctcattgaatagaagagaaaaggaggctcaaaaaaattaagtaacccacaaaaagtcacacagctgtgactgtcagtgtcctgctgggcactgcaaactaggccacttttaaagtaagatcattttaaattgagtacncctacttacaaatgaacccattaatgtgatattgacaaatattccnangccggacttataaaagtttaggaaaccaaataggatccaatccggtacccccttacctttttnaaanggtccccttgtc

SEQ ID NO: 411 - DNA, 145 bp, Homo sapiens
  misc_feature (1)...(145): n=a,t,g or c
gatccccatgctaagaaaatgcccaaaaaaataggcaaaacacgagaagagctagggtaagagaaggacgtaaacagaacctgacaccagctccttttccttctatacattatttaatacctattaaataaaatnatttttgaaa

SEQ ID NO: 412 - DNA, 204 bp, Homo sapiens
gttttttttttttttttttaagtacaatttccattttatttttctccagagaaatagcctgtcttcagtctttaagadctcagctccttacatkgggytttggtgggggacgtggggcagcacccgcagdtcctaaatcggggtgggggtgttcggtccttgcgggctccacgagatcgattcctgactactttgctgtgaatt

SEQ ID NO: 413 - DNA, 608 bp, Homo sapiens
accaaaaataagttatttattgctttaaaaaataaacatttataatagaataccaaattctatttaatctaatgtgttaacaaaagcataatatattccagtaaacaaggacttccaacttatcctataactaaaaagtcaactaaacagttggttttagctagagacaaacatcagtcactgccaccaaattccattatataaatttattttgcttcacatttaaggagaaacccagcagaggggtcgccctgctcttccccactagaaatgtactgaaaagtgacaagcccacagaaggaaaggctgtataaggaagtaggagcttcagtcaaatttctactttcattaccctgagggaggtgaaggagggtgttattttcatcaggtcaacatggatgacagtttgatcataaaaaacagcccacattaagatttcatttgtgaaatatggtgagcatgatcatgccctaatgatttcttagggtttggcagtgtctctggtcacatgcccatacttagggttgaaagaaatgctaatactgtaccctgggtcttcctcagatgccacagtggctcctgccctaggatgactaaaaatacggctc

SEQ ID NO: 414 - DNA, 1086 bp, Homo sapiens
cgcagccgcccgcccgcccgctcagcgcccggccccgggatgacggcggcccaggccgcgggtgaggaggcgccaccaggcgtgcggtccgtcaaggtggtcctggtgggcgacggcggctgcgggaagacgtcgctgctgatggtcttcgccgatggggccttccccgagagctacacccccacggtgtttgagcggtacatggtcaacctgcaagtgaaaggcaaacctgtgcacctccacatctgggacacagcagggcaagatgactatgaccgcctgcggcccctgttctaccctgacgccagcgtcctgctgctttgcttcgatgtcaccagcccgaacagctttgacaacatctttaaccggtggtacccagaagtgaatcatttctgcaagaaggtacccatcatcgtcgtgggctgcaagactgacctgcgcaaggacaaatcactggtgaacaagctccgaagaaacggattggagcctgtgacctaccacaggggccaggagatggcgaggtccgtgggcgcggtggcctacctcgagtgctcggctcggctccatgacaacgtccacgccgtcttccaggaggccgccgaggtggccctcagcagccgcggtcgcaacttctggcggcggattacccagggcttttgcgtggtgacctgagcggctcggggcgtcccagcgacgcgggaaggggcagggcgctgacctgctgctgagctggctgggctggacccggtccctaggctgtgaccgccgaactccactgcaacagacgggcgccaccaaagccaggccctgaggcctgggagtcctggactgagaaagggggttcctgggcccacctgctctgtgtagggctcgtcctgcggtgcccgagaatcactcgctaacccctatgcccggtcccggaccgacatcctggagccgcctgtgcagcctgatgccccctcgtggctgctcccagggctgcacctgccaggacctaatgttcttaggtccctctggccagaacccacacccggccccttcccacctgtcatactggtaactgtaacaagaaaaacgacatcactt

SEQ ID NO: 415 - DNA, 1885 bp, Homo sapiens
cgggcactcaccgtgtgtagttggcatctccgcgcgtccggacacccgatcccagcatccctgcctgcaggactgttcgtgttcagctcgcgtcctgcagctgtccgaggtgctccagttggaggctgaggttcccgggctctgtcgctgagtgggcggcggcaccggcggagatgcctgggaagaaggcgcgcaagaacgctcaaccgagccccgcgcgggctccagcagagctggaagtcgagtgtgctactcaactcaggagatttggagacaaactgaacttccggcagaaacttctgaatctgatatccaaactcttctgctcaggaacctgactgcatcaaaaacttgcatgaggggactccttcaaaagagttttctcaggaggtgcacgtttcatcaatttgaagaaagactgcattgtaattgagaggaatgtgaaggtgcattcatgggtgcccttggaaacggaagatggaatacatcaaagtgaatttctgttcaagttttcccagattatcattctttgggatgagagaacattataaaaccactttgtttattttaaagcaagaatggaagacccttgaaaataaagaagtaattattgacacatttcttttttacttagagaatcgttctagtgtttttgccgaagattaccgctggcctactgtgaaggtagatgacctgtgattagactgggcggctggggagaaacagttcagtgcattgttgttgttgctgtttttggtgttttgcttttcagtgccaactcagcacattgtatatgattcggtttatacatattaccttgttataatgaaaaaactcattctgagaacactgaaatgttatactcagtgttgatttcttcggtcactacacaacgtaaaatcatttgtttcttttgactcaaattgtattgcttctgttcagatgatctttcattcaatgtgttcctgttgggcgttactagaaactatggaaaactggaaaataactttgaaaaaattggataaagtataggagggttacttggggccagtaaatcagtagactgaacattcaatataataaaagaacatggggattttgtataaccagggataataaaaagaaaaagaagttaatttttaattgatgtttttgaaacttagtagaacaaatattcagaagtaacttgataagatatgaatgtttctaaagagtttctaaaggttcgaaatgctccttgtcacattagtgtgcatcctacaaaaagtgatctcttaatgtaaattaagaatattttcataattggaatatacttttcttaaaaaaaaggaacagttagttctcatctagaatgaaagttccatatatgcattggtgaatatatatgtatacacatacttacatacttatatgggtatctgtatagataatttgtattagagtattatatagcttcttagtagggtctcaagtaagttcattttttttatctgggctatatacagtcctcaaataaataatgtcttgattttatttcagcaggaataattttatttattttgcctatttataattaaagtatttttctttagtttgaaatgtgtattaaagttacatttttgagttacaagagtcttataactacttgaatttttagttaaaatgtcttaatgtaggttgtagtcactttagatggaaaattacctcacatctgttttcttcagtattacttaagattgtttatttagtggtagagagattttttttttcagcctagaggcagctattttaccatctggtatttatggtctaatttgtatttaaacatatgcacacatataaaagttgatactgtggcagtaaactattaaaagttttcactgtt

SEQ ID NO: 416 - DNA, 251 bp, Homo sapiens
aacagcttaagaccgaggtttattttttctttcacgggacagtgtaatgcaagccaggaaactccttagtagcttttctctaacagcagctcacagatccaggcagcttccatcttgcaacttcgccatctcggtgtttcccttccagtcacagtgatgataaagagagtaaagagaactcacaaactgttcccaactgccttagaccaaagcgacacctgtcacttctgttcacagcccatcaaccagtc

SEQ ID NO: 417 - DNA, 245 bp, Homo sapiens
  misc_feature (1)...(245): n=a,t,g or c
ctataaatctctaatgttatttaggttttttaaggttttggaagtaacagagggatacatacagcaagatccacttacatagttttaaaacatgcaaaacaagattatatatcgtccatatgtaattatatctgtggtaaaatataaagatatgcattttggggacatagtcaccagattattagtagctcaaggaaaggcaggnggaagagtgctctgggtggggggaggttcacagggtgctt

SEQ ID NO: 418 - DNA, 268 bp, Homo sapiens
  misc_feature (1)...(268): n=a,t,g or c
gctttccaaagttttattttttnatttgtacctgccttgttccagaaaacattgaaggtggcttcccaaagtctaactagggataccccctctagcctaggaccctcctccccacacctcaatccaccaaaccatccataatgcacccagataggcccacccccaaaagcctggacaccttgagcacacagttatgaccaggacagactcatctctataggcaaatagctgctggcaaactggcattacctggtttgtggggatgggg

SEQ ID NO: 419 - DNA, 277 bp, Homo sapiens
  misc_feature (1)...(277): n=a,t,g or c
aatcgttataacagttttattcaagtctctgtgtgctctggcattgagaccaggctgagatcagcattacactgtaatacaataagaggtttagccattgaaccaagcctgcttggcatccctagttaacaatttacagtacctcgaaagaaaaaaaaaaaaagccaaaggaaagancctggtaagtttccttcaggactttttcatctttaaatattgttgacaacatacaataacttaaatcccaaagcaaagtgggaattcaaggacacggggt

SEQ ID NO: 420 - DNA, 399 bp, Homo sapiens
  misc_feature (1)...(399): n=a,t,g or c
tcaaaatatttattgaaaaacaatttaccatgacattcctataccacaaacataccactggattctaaataaccaataaaagtatacaaagcctatcctgaaaatatctttggnggtattaaatatataggcccatgaggatagagctgagtaacttaaaaatgttagtccttgggtcacaangactatttgggnaattantaangangngcctcttgacattaggactgcanttaactgaggggtggggggggcatccatataggtcactccggggtttatgggaggggttcttctactattagggncttttcgcttcgaggcgaggcctcggtgcccgaattcttgggcctcgaggggcccaaattcccnataggtgaggtcgtatttaaattccgg

SEQ ID NO: 421 - DNA, 433 bp, Homo sapiens
  misc_feature (1)...(433): n=a,t,g or c
ttttttttttgagtaaaagtgatcgtcatttgagagttatttggctgctttgggcttcaaggctggagaagcaggtaatggcacagtatctcactcactgttcttcctgccctggggttggcagcaccaccagaatgcccagaccactgagttggaattgtcttcccagatttccaactcaggtaaaagaacaaaagccaacaggaaccaatgggctaaggagggagcaacatgtaaaacagtgggtntaaaagaagaaatgcaacgtaaggaggggcaggagagaagtcaaggataatgggagccgagtgggtggccaggaaatntgagtagctctgtgctgactagccttcagtgttaaaacaaatttaaggggaagcagcattatgaggtctcaaggtantgggagccacctgnaaacgggggttaaaag

SEQ ID NO: 422 - DNA, 446 bp, Homo sapiens
  misc_feature (1)...(446): n=a,t,g or c
tttttttttggagcaaggaaagggactttatttcggagagccagcaaaccaagaagatggtggactaatgtcctaaagaaccgtcttaaaattatgcgggctttgcttgtcttttatgtttaggtcgggggaaaggaaggggctgacaaccgcagacatctggacaccagcaagggtccaggggaggtttgcagaacttctttgtccttggctaacagtctgtcatgtgacaatagccaaacctcctcattcctataaacctttaacaaaaacagttaggctgtttacatggcttcccctttaatcccagagttagttttgcaaacgggcatgattcctgtttttgcgttttatctcagtggctcttaaagttattcctaggcctagggtgcagggantagggtaaagggccccttaaaataaaaaatgggagttagttatgttta

SEQ ID NO: 423 - DNA, 249 bp, Homo sapiens
  misc_feature (1)...(249): n=a,t,g or c
aggaagaaagaaaaatttttattacaaggaaagaaaaggagacggccagtctcagacccttctgcgttcagagagacggcagagattcgccatgcaggatgaaattaaggtcagagagccgtttacgctatgctcgggctccccgggctcttcctccctctacggctggccggcattgctggtgcgattcggaagaacgagctgcagnagtcgctcccggccgagggaagggaccgggggcggtgcggg

SEQ ID NO: 424 - DNA, 153 bp, Homo sapiens
  misc_feature (1)...(153): n=a,t,g or c
nngtanttaccaattgtatttattgctagaaactttaaactttttaaaaaagtttttgaatggtagataacatagaaaaagacatccataaaggtaggaagcaatctcatcatttacaaagtgctgcaaatttgataaatttatgttgctgat

SEQ ID NO: 425 - DNA, 468 bp, Homo sapiens
  misc_feature (1)...(468): n=a,t,g or c
ggatctgtgccaaggtttacagcagatattaaaactcttcgatgtctcactgctgttgttcagtcactctctgacttataagaatttagaggtcagatttccccacatatttgaacccttattctgggtccagtcctgtcttcacttccacaactgctgtgttcccacagggagtggatcttctgggagccatttgtaagatagttcaatctgaatttttaacgagatggtacttctcttgggccccacagacacctgcttctccccggatcgctattctcgactatttgcgtttcgggaccggcctgcccctcctctttcccgctctgcccagggaaaagcgagccctcggaaggaacctgggggcagccccagaaagcagtgcccatcaatttccagctncatccacccaggcaggcccatcaatggacctaaatatggtgtctgnttccanccagtnctggccgg

SEQ ID NO: 426 - DNA, 395 bp, Homo sapiens
  misc_feature (1)...(395): n=a,t,g or c
ngaggacaccactcaccacagatagccacatgggggttgcactatgcataagagagagcaaccagggactgtggtatgtaagcttttctgaatcaagaaggtgtgatagcccctgattcccttgaaaggatgcaactggcttgtttttaatttttgagacagggtctcgctctgtcactcctgctggagcgtagtgntgcaattacagctcactgcagcctgaactttccaggtttcagggatcctcctacctcagcctcccgagtgggctggggaccataggtgtgcgacaccacacccagctgtaactgggcttgtttgaattaactctgtgtgtaggaaatgaaattcaaacttgctacaaataaattaataaacagggactctggcttagt

SEQ ID NO: 427 - DNA, 415 bp, Homo sapiens
  misc_feature (1)...(415): n=a,t,g or c
gganttatggtacagtgcatcttgtattaactccacggccatgagacaatgcaaagaacacaaaacttttcaacaatataaacaccatatatcttcaaaatattgtgagaaaagtaaattttgatgggctaaaaaaacaaatatatacataaaggcacatgtaaccagaattctaccaaaaaaaaaaattatcttaagtggaggaatttttcttgctctacaactaaatgaaactgccctaatctgaaagacaaataggccctgtgaaaatctacacctatggcttttcccataanggtacttccttatttatataaggtnttgtantttactttaanatcataacagactantccaactcacttgttgctcaggggggttggcacaaggggncctttntttgggccanctcttc

SEQ ID NO: 428 - DNA, 272 bp, Homo sapiens
  misc_feature (1)...(272): n=a,t,g or c
atcatttattcaaggcatttttatataatcttgcaatcatagtatagatgtataataaaagaatatgagaatgcaaagaggaacataaagccaatgtctgagcatttaaaataagagttcttcaaaaaagttacacgtcttacaaataacattcctgaaaaatttgggagaagctaaaacttcactaaaaacctaacaccaaatgacatgtnacttagtttatagcaagcagttttatatnaattaaatgtntatanaccacaagcnaagat

SEQ ID NO: 429 - DNA, 5416 bp, Homo sapiens
gtgtcccatagtgtttccaaacttggaaagggcgggggagggcgggaggatgcggagggcggaggtatgcagacaacgagtcagagtttccccttgaaagcctcaaaagtgtccacgtcctcaaaaagaatggaaccaatttaagaagccagccccgtggccacgtcccttcccccattcgggccctcctctgcgcccccgcaggctcctcccagctgtggctgcccgggcccccagccccagccctcccattggtggaggcccttttggaggcaccctagggccagggaaacttttgccgtataaatagggcagatccgggatttgttattttagcaccacggcagcaggaggtttcggctaagttggaggtactggccacgactgcatgcccgcgcccgccatgtgatacctccgccggtgacccagggctctgcgacacaaggagtcgcatgtctaagtgctagacatgctcagctttgtggatacgcggactttgttgctgcttgcagtaaccttatgcctagcaacatgccaatctttacaagaggaaactgtaagaaagggcccagccggagatagaggaccacgtggagaaaggggtccaccaggccccccaggcagagatggtgaagatggtcccacaggccctcctggtccacctggtcctcctggcccccctggtctcggtgggaactttgctgctcagtatgatggaaaaggagttggacttggccctggaccaatgggcttaatgggacctagaggcccacctggtgcagctggagccccaggccctcaaggtttccaaggacctgctggtgagcctggtgaacctggtcaaactggtcctgcaggtgctcgtggtccagctggccctcctggcaaggctggtgaagatggtcaccctggaaaacccggacgacctggtgagagaggagttgttggaccacagggtgctcgtggtttccctggaactcctggacttcctggcttcaaaggcattaggggacacaatggtctggatggattgaagggacagcccggtgctcctggtgtgaagggtgaacctggtgcccctggtgaaaatggaactccaggtcaaacaggagcccgtggtcttcctggtgagagaggacgtgttggtgcccctggtccagctggtgcccgtggaagtgatggaagtgtgggtcccgtaggtcctgctggtcctaatgggtctgctggccctccaggtttcccaggtgcccctggtcccaagggtgaaattggagctgttggtaacgctggtcctactggacccgccggtccccgtggtgaagtgggtcttccaggcctctccggccccgttggacctcctggtaatcctggagcaaacggccttactggtgccaagggtgctgctggccttcccggcgttgctggggctcccggcctccctggaccccgcggtattcctggccctcctggtgctgccggtactactggtgccagaggacttgttggtgagcctggtccagctggctccaaaggagagagcggtaacaagggtgagcccggctccgctggtccccaaggtcctcctggtcccagtggtgaagaaggaaagagaggccctaatggggaagctggatctgccggccctccaggacctcctgggctgagaggtagtcctggttctcgtggtcttcctggagctgatggcagagctggcgtcatgggccctcctggtagtcgtggtgcaagtggccctgctggagtccgaggacctaatggagatgctggtcgccctggggagcctggtctcatgggacccagaggtcttcctggttcccctggaaatatcggccccgctggaaaagaaggtcctgtcggcctccctggcatcgacggcaggcctggcccaattggccccgttggagcaagaggagagcctggcaacattggattccctggacccaaaggccccactggtgaccctggcaaaaacggtgataaaggtcatgctggtcttgctggtgctcggggtgctccaggtcctgatggaaacaatggtgctcagggacctcctggaccacagggtgttcaaggtggaaaaggtgaacagggtcccgctggtcctccaggcttccagggtctgcctggcccctcaggtcccgctggtgaagttggcaaaccaggagaaaggggtctccatggtgagtttggtctccctggtcctgctggtccaagaggggaacgcggtcccccaggtgagagtggtgctgccggtcctactggtcctattggaagccgaggtccttctggacccccagggcctgatggaaacaagggtgaacctggtgtggttggtgctgtgggcactgctggtccatctggtcctagtggactcccaggagagaggggtgctgctggcatacctggaggcaagggagaaaagggtgaacctggtctcagaggtgaaattggtaaccctggcagagatggtgctcgtggtgctcatggtgctgtaggtgcccctggtcctgctggagccacaggtgaccggggcgaagctggggctgctggtcctgctggtcctgctggtcctcggggaagccctggtgaacgtggcgaggtcggtcctgctggccccaacggatttgctggtccggctggtgctgctggtcaaccgggtgctaaaggagaaagaggaggcaaagggcctaagggtgaaaacggtgttgttggtcccacaggccccgttggagctgctggcccagctggtccaaatggtccccccggtcctgctggaagtcgtggtgatggaggcccccctggtatgactggtttccctggtgctgctggacggactggtcccccaggaccctctggtatttctggccctcctggtccccctggtcctgctgggaaagaagggcttcgtggtcctcgtggtgaccaaggtccagttggccgaactggagaagtaggtgcagttggtccccctggcttcgctggtgagaagggtccctctggagaggctggtactgctggacctcctggcactccaggtcctcagggtcttcttggtgctcctggtattctgggtctccctggctcgagaggtgaacgtggtctacctggtgttgctggtgctgtgggtgaacctggtcctcttggcattgccggccctcctggggcccgtggtcctcctggtgctgtgggtagtcctggagtcaacggtgctcctggtgaagctggtcgtgatggcaaccctgggaacgatggtcccccaggtcgcgatggtcaacccggacacaagggagagcgcggttaccctggcaatattggtcccgttggtgctgcaggtgcacctggtcctcatggccccgtgggtcctgctggcaaacatggaaaccgtggtgaaactggtccttctggtcctgttggtcctgctggtgctgttggcccaagaggtcctagtggcccacaaggcattcgtggcgataagggagagcccggtgaaaaggggcccagaggtcttcctggcttcaagggacacaatggattgcaaggtctgcctggtatcgctggtcaccatggtgatcaaggtgctcctggctccgtgggtcctgctggtcctaggggccctgctggtccttctggccctgctggaaaagatggtcgcactggacatcctggtacggttggacctgctggcattcgaggccctcagggtcaccaaggccctgctggcccccctggtccccctggccctcctggacctccaggtgtaagcggtggtggttatgactttggttacgatggagacttctacagggctgaccagcctcgctcagcaccttctctcagacccaaggactatgaagttgatgctactctgaagtctctcaacaaccagattgagacccttcttactcctgaaggctctagaaagaacccagctcgcacatgccgtgacttgagactcagccacccagagtggagcagcggttactactggattgaccccaaccaaggatgcactatggaagccatcaaagtatactgtgatttccctaccggcgaaacctgtatccgggcccaacctgaaaacatcccagccaagaactggtataggagctccaaggacaagaaacacgtctggctaggagaaactatcaatgctggcagccagtttgaatataatgttgaaggagtgacttccaaggaaatggctacccaacttgccttcatgcgcctgctggccaactatgcctctcagaacatcacctaccactgcaagaacagcattgcatacatggatgaggagactggcaacctgaaaaaggctgtcattctacagggctctaatgatgttgaacttgttgctgagggcaacagcaggttcacttacactgttcttgtagatggctgctctaaaaagacaaatgaatggggaaagacaatcattgaatacaaaacaaataagccatcacgcctgcccttccttgatattgcacctttggacatcggtggtgctgaccatgaattctttgtggacattggcccagtctgtttcaaataaatgaactcaatctaaattaaaaaagaaagaaatttgaaaaaactttctctttgccatttcttcttcttcttttttaactgaaagctgaatccttccatttcttctgcacatctacttgcttaaattgtgggcaaaagagaaaaagaaggattgatcagagcattgtgcaatacagtttcattaactccttcccccgctcccccaaaaatttgaatttttttttcaacactcttacacctgttatggaaaatgtcaacctttgtaagaaaaccaaaataaaaattgaaaaataaaaaccataaacatttgcaccacttgtggcttttgaatatcttccacagagggaagtttaaaacccaaacttccaaaggtttaaactacctcaaaacactttcccatgagtgtgatccacattgttaggtgctgacctagacagagatgaactgaggtccttgttttgttttgttcataatacaaaggtgctaattaatagtatttcagatacttgaagaatgttgatggtgctagaagaatttgagaagaaatactcctgtattgagttgtatcgtgtggtgtattttttaaaaaatttgatttagcattcatattttccatcttattcccaattaaaagtatgcagattatttgcccaaagttgtcctcttcttcagattcagcatttgttctttgccagtctcattttcatcttcttccatggttccacagaagctttgtttcttgggcaagcagaaaaattaaattgtacctattttgtatatgtgagatgtttaaataaattgtgaaaaaaatgaaataaagcatgtttggttttccaaaagaacatat

SEQ ID NO: 430 - DNA, 5508 bp, Homo sapiens
gattttaggtgatgggcaagtcagaaagtcagatggatataactgatatcaacactccaaagccaaagaagaaacagcgatggactcgactggagatcagcctctcggtccttgtcctgctcctcaccatcatagctgtgagaatgatcgcactctatgcaacctacgatgatggtatttgcaagtcatcagactgcataaaatcagctgctcgactgatccaaaacatggatgccaccactgagccttgtagagactttttcaaatatgcttgcggaggctggttgaaacgtaatgtcattcccgagaccagctcccgttacggcaactttgacattttaagagatgaactagaagtcgttttgaaagatgtccttcaagaacccaaaactgaagatatagtagcagtgcagaaagcaaaagcattgtacaggtcttgtataaatgaatctgctattgatagcagaggtggagaacctctactcaaactgttaccagacatatatgggtggccagtagcaacagaaaactgggagcaaaaatatggtgcttcttggacagctgaaaaagctattgcacaactgaattctaaatatgggaaaaaagtccttattaatttgtttgttggcactgatgataagaattctgtgaatcatgtaattcatattgaccaacctcgacttggcctcccttctagagattactatgaatgcactggaatctataaagaggcttgtacagcatatgtggattttatgatttctgtggccagattgattcgtcaggaagaaagattgcccatcgatgaaaaccagcttgctttggaaatgaataaagttatggaattggaaaaagaaattgccaatgctacggctaaacctgaagatcgaaatgatccaatgcttctgtataacaagatgagattggcccagatccaaaataacttttcactagagatcaatgggaagccattcagctggttgaatttcacaaatgaaatcatgtcaactgtgaatattagtattacaaatgaggaagatgtggttgtttatgctccagaatatttaaccaaacttaagcccattcttaccaaatattctgccagagatcttcaaaatttaatgtcctggagattcataatggatcttgtaagcagcctcagccgaacctacaaggagtccagaaatgctttccgcaaggccctttatggtacaacctcagaaacagcaacttggagacgttgtgcaaactatgtcaatgggaatatggaaaatgctgtggggaggctttatgtggaagcagcatttgctggagagagtaaacatgtggtcgaggatttgattgcacagatccgagaagtttttattcagactttagatgacctcacttggatggatgccgagacaaaaaagagagctgaagaaaaggccttagcaattaaagaaaggatcggctatcctgatgacattgtttcaaatgataacaaactgaataatgagtacctcgagttgaactacaaagaagatgaatacttcgagaacataattcaaaatttgaaattcagccaaagtaaacaactgaagaagctccgagaaaaggtggacaaagatgagtggataagtggagcagctgtagtcaatgcattttactcttcaggaagaaatcagatagtcttcccagccggcattctgcagccccccttctttagtgcccagcagtccaactcattgaactatgggggcatcggcatggtcataggacacgaaatcacccatggcttcgatgacaatggcagaaactttaacaaagatggagacctcgttgactggtggactcaacagtctgcaagtaactttaaggagcaatcccagtgcatggtgtatcagtatggaaacttttcctgggacctggcaggtggacagcaccttaatggaattaatacactgggagaaaacattgctgataatggaggtcttggtcaagcatacagagcctatcagaattatattaaaaagaatggcgaagaaaaattacttcctggacttgacctaaatcacaaacaactatttttcttgaactttgcacaggtgtggtgtggaacctataggccagagtatgcggttaactccattaaaacagatgtgcacagtccaggcaatttcaggattattgggactttgcagaactctgcagagttttcagaagcctttcactgccgcaagaattcatacatgaatccagaaaagaagtgccgggtttggtgatcttcaaaagaagcattgcagcccttggctagacttgccaacaccacagaaatggggaattctctaatcgaaagaaaatgggccctaggggtcactgtactgacttgagggtgattaacagagagggcaccatcacaatacagataacattaggttgtcctagaaagggtgtggagggaggaagggggtctaaggtctatcaagtcaatcatttctcactgtgtacataatgcttaatttctaaagataatattactgtttatttctgtttctcatatggtctaccagtttgctgatgtccctagaaaacaatgcaaaacctttgaggtagaccaggatttctaatcaaaagggaaaagaagatgttgaagaatagagttaggcaccagaagaagagtaggtgacactatagtttaaaacacattgcctaactactagtttttacttttatttgcaacatttacagtccttcaaaatccttccaaagaattcttatacacattggggccttggagcttacatagttttaaactcatttttgccatacatcagttattcattctgtgatcatttattttaagcactcttaaagcaaaaaatgaatgtctaaaattgttttttgttgtacctgctttgactgatgctgagattcttcaggcttcctgcaattttctaagcaatttcttgctctatctctcaaaacttggtatttttcagagatttatataaatgtaaaaataataatttttatatttaattattaactacatttatgagtaactattattataggtaatcaatgaatattgaagtttcagcttaaaataaacagttgtgaaccaagatctataaagcgatatacagatgaaaatttgagactatttaaacttataaatcatattgatgaaaagatttaagcacaaactttagggtaaaaattgcgattggacagttgtctagagatatatatacttgtggttttcaaattggactttcaaaattaaatctgtccctgagagtgtctctgataaaagggcaaatctgcacctatgtagctctgcatctcctgtcttttcaggtttgtcatcagatggaaatattttgataataaattgaaattgtgaactcattgctccctaagactgtgacaactgtctaactttagaagtgcatttctgaatagaaatgggaggcctctgatggaccttctagaattataagtcacaaagagttctggaaaagaactgtttactgcttgataggaattcatcttttgaggcttctgttcctctcttttcctgttgtattgactattttcgttcattacttgattaagattttacaaaagaggagcacttccaaaattcttatttttcctaacaaaagatgaaagcagggaatttctatctaaatgatgagtattagttccctgtctcttgaaaaatgcccatttgcctttaaaaaaaaaagttacagaaatactataacatatgtacataaattgcataaagcataagtatacagttcaataaacttaactttaactgaacaatggccctgtagccagcacctgtaagaaacagagcagtaccagcgctctaaaagcacctccttgtcactttattactcccagaacaacaactatcctgacttctaatatcattcactagctttgcctggttttgtcttttatgcagatagaatcaatcagtatgtattcttttgtgcctggcttctttctctcagccttacatttgtgagattcctctgtattgtgctgattgtggatcttttcattctcattgcagaataatgttctattgtgggacttattacaatttgttcatcctattgttgatgggcacttgagaactttccattttggcgctattacaaatagtgcaactatgaatgtactgcatgttaccatcttacttgagcctttaatggacttatttcttcaaatccttccaaaaattattataagcattgaaattatagtttcaagccaactgtggatacccttaccctttcctcctttatcacaaccaccgttacaagtatacttatatttccctaaaatacatttaaaacttacctaagtgacatttgtagttggagtaataggagcttccagctctaataaaacagctgtctctaacttattttatttccatcatgtcagagcaggtgaagagccagaagtgaagagtgactagtacaaattataaaaagccactagactcttcactgttagctttttaaaacattaggctcccatccctatggaggaacaactctccagtgcctggatcccctctgtctacaaatataagattttctgggcctaaaggatagatcaaagtcaaaaatagcaatgcctccctatccctcacacatccagacatcatgaattttacatggtactcttgttgagttctatagagccttctgatgtctctaaagcactaccgattctttggagttgtcacatcagataagacatatctctaattccatccataaatccagttctactatggctgagttctggtcaaagaaagaaagtttagaagctgagacacaaagggttgggagctgatgaaactcacaaatgatggtaggaagaagctctcgacaatacccgttggcaaggagtctgcctccatgctgcagtgttcgagtggattgtaggtgcaagatggaaaggattgtaggtgcaagctgtccagagaaaagagtccttgttccagccctattctgccactcctgacagggtgaccttgggtatttgcaatattcctttgggcctctgcttctctcacctaaaaaaagagaattagattatattggtggttctcagcaagagaaggagtatgtgtccaatgctgccttcccatgaatctgtctcccagttatgaatcagtgggcaggataaactgaaaactcccatttaagtgtctgaatcgagtgagacaaaattttagtccaaataacaagtaccaaagttttatcaagtttgggtctgtgctgctgttactgttaaccatttaagtggggcaaaaccttgctaattttctcaaaagcatttatcattcttgttgccacagctggagctctcaaactaaaagacatttgttattttggaaagaagaaagactctattctcaaagtttcctaatcagaaatttttatcagtttccagtctcaaaaatacaaaataaaaacaaacgtttttaatact

SEQ ID NO: 431 - DNA, 2259 bp, Homo sapiens
gttctccccttcccggctttcggtccggaggaggcgggagcagcttccctgttctgatcctatcgcgggcggcgcagggccggcttggccttccgtgggacggggaggggggcgggatgtgtcacccaaataccagtggggacggtcggtggtggaaccagccgggcaggtcgggtagagtataagagccggagggagcggccgggcggcagacgcctgcagaccatcccagacgccggagcccgagccccgccgagtccccgcgcctcatccgcccgcgtccggtccgcgttcctccgccccaccatggctcggggccccggcctcgcgccgccaccgctgcggctgccgctgctgctgctggtgctggcggcggtgaccggccacacggccgcgcaggacaactgcacgtgtcccaccaacaagatgaccgtgtgcagccccgacggccccggcggccgctgccagtgccgcgcgctgggctcgggcatggcggtcgactgctccacgctgacctccaagtgtctgctgctcaaggcgcgcatgagcgcccccaagaacgcccgcacgctggtgcggccgagtgagcacgcgctcgtggacaacgatggcctctacgaccccgactgcgaccccgagggccgcttcaaggcgcgccagtgcaaccagacgtcggtgtgctggtgcgtgaactcggtgggcgtgcgccgcacggacaagggcgacctgagcctacgctgcgatgacctggtgcgcacccaccacatcctcattgacctgcgccaccgccccaccgccggcgccttcaaccactcagacctggacgccgagctgaggcggctcttccgcgagcgctatcggctgcaccccaagttcgtggcggccgtgcactacgagcagcccaccatccagatcgagctgcggcagaacacgtctcagaaggccgccggtgaagtggatatcggcgatgccgcctactacttcgagagggacatcaagggcgagtctctattccagggccgcggcggcctggacttgcgcgtgcgcggagaacccctgcaggtggagcgcacgctcatctattacctggacgagattcccccgaagttctccatgaagcgcctcaccgccggcctcatcgccgtcatcgtggtggtcgtggtggccctcgtcgccggcatggccgtcctggtgatcaccaaccggagaaagtcggggaagtacaagaaggtggagatcaaggaactgggggagttgagaaaggaaccgagcttgtaggtacccggcggggcaggggatggggtggggtaccggatttcggtatcgtcccagacccaagtgagtcacgcttcctgattcctcggcgcaaaggagacgtttatcctttcaaattcctgccttccccctcccttttgcgcacacaccaggtttaatagatcctggcctcagggtctcctttctttctcacttctgtcttgaaggaagcatttctaaaatgtatcccctttcggtccaacaacaggaaacctgactggggcagtgaaggaagggatggcacagcgttatgtgtaaaaaacaagtatctgtatgacaacccgggatcgtttgcaagtaactgaatccattgcgacattgtgaaggcttaaatgagtttagatgggaaatagcgttgttatcgccttgggtttaaattatttgatgagttccacttgtatcatggcctacccgaggagaagaggagtttgttaactgggcctatgtagtagcctcatttaccatcgtttgtattactgaccacatatgcttgtcactgggaaagaagcctgtttcagctgcctgaacgcagtttggatgtctttgaggacagacattgcccggaaactcagtctatttattcttcagcttgcccttactaccactgatattggtaatgttcttttttgtaaaatgtttgtacatatgttgtctttgataatgttgctgtaattttttaaaataaaacacgaatttaataaaatatgggaaaggcacaaaccagaagttggcatttgtgaaaagtccctccagatttctatcactttggtctctaatttcccaagacttgtattttttttttatttcaaattataacacttttttttcccccagaagtgggtgtttcatgttgctactctggtgtgtcccaagatatcctaactggccagtgtaaatgctattctttctaaataagattatttggaaacttccttcaaactgcag

SEQ ID NO: 432 - DNA, 6158 bp, Homo sapiens
  misc_feature (1)...(6158): n=a,t,g or c
aaccatcaaatttagaagaaaaagccctttgactttttccccctctccctccccaatggctgtgtagcaaacatccctggcgataccttggaaaggacgaagttggtctgcagtcgcaatttcgtgggttgagttcacagttgtgagtgcggggctcggagatggagccgtggtcctctaggtggaaaacgaaacggtggctctgggatttcaccgtaacaaccctcgcattgaccttcctcttccaagctagagaggtcagaggagctgctccagttgatgtactaaaagcactagattttcacaattctccagagggaatatcaaaaacaacgggattttgcacaaacagaaagaattctaaaggctcagatactgcttacagagtttcaaagcaagcacaactcagtgccccaacaaaacagttatttccaggtggaactttcccagaagacttttcaatactatttacagtaaaaccaaaaaaaggaattcagtctttccttttatctatatataatgagcatggtattcagcaaattggtgttgaggttgggagatcacctgtttttctgtttgaagaccacactggaaaacctgccccagaagactatcccctcttcagaactgttaacatcgctgacgggaagtggcatcgggtagcaatcagcgtggagaagaaaactgtgacaatgattgttgattgtaagaagaaaaccacgaaaccacttgatagaagtgagagagcaattgttgataccaatggaatcacggtttttggaacaaggattttggatgaagaagtttttgagggggacattcagcagtttttgatcacaggtgatcccaaggcagcatatgactactgtgagcattatagtccagactgtgactcttcagcacccaaggctgctcaagctcaggaacctcagatagatgagtatgcaccagaggatataatcgaatatgactatgagtatggggaagcagagtataaagaggctgaaagtgtaacagagggacccactgtaactgaggagacaatagcacagacggaggcaaacatcgttgatgattttcaagaatacaactatggaacaatggaaagttaccagacagaagctcctaggcatgtttctgggacaaatgagccaaatccagttgaagaaatatttactgaagaatatctaacgggagaggattatgattcccagaggaaaaattctgaggatacactatatgaaaacaaagaaatagacggcagggattctgatcttctggtagatggagatttaggcgaatatgatttttatgaatataaagaatatgaagataaaccaacaagcccccctaatgaagaatttggtccaggtgtaccagcagaaactgatattacagaaacaagcataaatggccatggtgcatatggagagaaaggacagaaaggagaaccagcagtggttgagcctggtatgcttgtcgaaggaccaccaggaccagcaggacctgcaggtattatgggtcctccaggtctacaaggccccactggaccccctggtgaccctggcgataggggccccccaggacgtcctggcttaccaggggctgatggtctacctggtcctcctggtactatgttgatgttaccgttccgttatggtggtgatggttccaaaggaccaaccatctctgctcaggaagctcaggctcaagctattcttcagcaggctcggattgctctgagaggcccacctggcccaatgggtctaactggaagaccaggtcctgtgggggggcctggttcatctggggccaaaggtgagagtggtgatccaggtcctcagggccctcgaggcgtccagggtccccctggtccaacgggaaaacctggaaaaaggggtcgtccaggtgcagatggaggaagaggaatgccaggagaacctggggcaaagggagatcgagggtttgatggacttccgggtctgccaggtgacaaaggtcacaggggtgaacgaggtcctcaaggtcctccaggtcctcctggtgatgatggaatgaggggagaagatggagaaattggaccaagaggtcttccaggtgaagctggcccacgaggtttgctgggtccaaggggaactccaggagctccagggcagcctggtatggcaggtgtagatggccccccaggaccaaaagggaacatgggtccccaaggggagcctgggcctccaggtcaacaagggaatccaggacctcagggtcttcctggtccacaaggtccaattggtcctcctggtgaaaaaggaccacaaggaaaaccaggacttgctggacttcctggtgctgatgggcctcctggtcatcctgggaaagaaggccagtctggagaaaagggggctctgggtccccctggtccacaaggtcctattggatnnccgggcccccggggagtaaagggagcagatggtgtcagaggtctcaagggatctaaaggtgaaaagggtgaagatggttttccaggattcaaaggtgacatgggtctaaaaggtgacagaggagaagttggtcaaattggcccaagagggnaagatggccctgaaggacccaaaggtcgagcaggcccaactggagacccaggtccttcaggtcaagcaggagaaaagggaaaacttggagttccaggattaccaggatatccaggaagacaaggtccaaagggttccactggattccctgggtttccaggtgccaatggagagaaaggtgcacggggagtagctggcaaaccaggccctcggggtcagcgtggtccaacgggtcctcgaggttcaagaggtgcaagaggtcccactgggaaacctgggccaaagggcacttcaggtggcgatggccctcctggccctccaggtgaaagaggtcctcaaggacctcagggtccagttggattccctggaccaaaaggccctcctggaccaccaggaaggatgggctgcccaggacaccctgggcaacgtggggagactggatttcaaggcaagaccggccctcctgggccagggggagtggttggaccacagggaccaaccggtgagactggtccaataggggaacgtgggtatcctggtcctcctggccctcctggtgagcaaggtcttcctggtgctgcaggaaaagaaggtgcaaagggtgatccaggtcctcaaggtatctcagggaaagatggaccagcaggattacgtggtttcccaggggaaagaggtcttcctggagctcagggtgcacctggactgaaaggaggggaaggtccccagggcccaccaggtccagttggctcaccaggagaacgtgggtcagcaggtacagctggcccaattggtttacgagggcgcccgggacctcagggtcctcctggtccagctggagagaaaggtgctcctggagaaaaaggtccccaagggcctgcagggagagatggagttcaaggtcctgttggtctcccagggccagctggtcctgccggctcccctggggaagacggagacaagggtgaaattggtgagccgggacaaaaaggcagcaagggtggcaagggagaaaatggccctcccggtcccccaggtcttcaaggaccagttggtgcccctggaattgctggaggtgatggtgaaccaggtcctagaggacagcaggggatgtttgggcaaaaaggtgatgagggtgccagaggcttccctggacctcctggtccaataggtcttcagggtctgccaggcccacctggtgaaaaaggtgaaaatggggatgttggtccatgggggccacctggtcctccaggcccaagaggccctcaaggtcccaatggagctgatggaccacaaggacccccaggttctgttggttcagttggtggtgttggagaaaagggtgaacctggagaagcaggaaacccagggcctcctggggaagcaggtgtaggcggtcccaaaggagaaagaggagagaaaggggaagctggtccacctggagctgctggacctccaggtgccaaggggccgccaggtgatgatggccctaagggtaacccgggtcctgttggttttcctggagatcctggtcctcctggggaacttggccctgcaggtcaagatggtgttggtggtgacaagggtgaagatggagatcctggtcaaccgggtcctcctggcccatctggtgaggctggcccaccaggtcctcctggaaaacgaggtcctcctggagctgcaggtgcagagggaagacaaggtgaaaaaggtgctaagggggaagcaggtgcagaaggtcctcctggaaaaaccggcccagtcggtcctcagggacctgcaggaaagcctggtccagaaggtcttcggggcatccctggtcctgtgggagaacaaggtctccctggagctgcaggccaagatggaccacctggtcctatgggacctcctggcttacctggtctcaaaggtgaccctggctccaagggtgaaaagggacatcctggtttaattggcctgattggtcctccaggagaacaaggggaaaaaggtgaccgagggctccctggaactcaaggatctccaggagcaaaaggggatgggggaattcctggtcctgctggtcccttaggtccacctggtcctccaggcttaccaggtcctcaaggcccaaagggtaacaaaggctctactggacccgctggccagaaaggtgacagtggtcttccagggcctcctgggcctccaggtccacctggtgaagtcattcagcctttaccaatcttgtcctccaaaaaaacgagaagacatactgaaggcatgcaagcagatgcagatgataatattcttgattactcggatggaatggaagaaatatttggttccctcaattccctgaaacaagacatcgagcatatgaaatttccaatgggtactcagaccaatccagcccgaacttgtaaagacctgcaactcagccatcctgacttcccagatggtgaatattggattgatcctaaccaaggttgctcaggagattccttcaaagtttactgtaatttcacatctggtggtgagacttgcatttatccagacaaaaaatctgagggagtaagaatttcatcatggccaaaggagaaaccaggaagttggtttagtgaatttaagaggggaaaactgctttcatacttagatgttgaaggaaattccatcaatatggtgcaaatgacattcctgaaacttctgactgcctctgctcggcaaaatttcacctaccactgtcatcagtcagcagcctggtatgatgtgtcatcaggaagttatgacaaagcacttcgcttcctgggatcaaatgatgaggagatgtcctatgacaataatccttttatcaaaacactgtatgatggttgtacgtccagaaaaggctatgaaaaaactgtcattgaaatcaatacaccaaaaattgatcaagtacctattgttgatgtcatgatcagtgactttggtgatcagaatcagaagttcggatttgaagttggtcctgtttgttttcttggctaagattaagacaaagaacatatcaaatcaacagaaaatgtaccttggtgccaccaacccattttgtgccacatgcaagttttgaataaggatgtatggaaaacaacgctgcatatacaggtaccatttaggaaataccgatgcctttgtgggggcagaatcacagacaaaagctttgaaaatcataaagatataagttggtgtggctaagatggaaacagggctgattcttgattcccaattctcaactctccttttcctatttgaatttctttggtgctgtagaaaacaaaaaaagaaaaatatatattcataaaaaatatggtgctcattctcatccatccaggatgtactaaaacagtgtgtttaataaattgtaattattttgtgtacagttctatactgttatctgtgtccatttccaaaacttgcacgtgtccctgaattccgctgactctaatttatgaggatgccgaactctgatggcaataatatatgtattatgaaaatgaagttatgatttccgatgaccctaagtccctttctttggttaatgatgaaattcctttgtgtgtgttt

SEQ ID NO: 433 - DNA, 2334 bp, Homo sapiens
agacacctctgccctcaccatgagcctctggcagcccctggtcctggtgctcctggtgctgggctgctgctttgctgcccccagacagcgccagtccacccttgtgctcttccctggagacctgagaaccaatctcaccgacaggcagctggcagaggaatacctgtaccgctatggttacactcgggtggcagagatgcgtggagagtcgaaatctctggggcctgcgctgctgcttctccagaagcaactgtccctgcccgagaccggtgagctggatagcgccacgctgaaggccatgcgaaccccacggtgcggggtcccagacctgggcagattccaaacctttgagggcgacctcaagtggcaccaccacaacatcacctattggatccaaaactactcggaagacttgccgcgggcggtgattgacgacgcctttgcccgcgccttcgcactgtggagcgcggtgacgccgctcaccttcactcgcgtgtacagccgggacgcagacatcgtcatccagtttggtgtcgcggagcacggagacgggtatcccttcgacgggaaggacgggctcctggcacacgcctttcctcctggccccggcattcagggagacgcccatttcgacgatgacgagttgtggtccctgggcaagggcgtcgtggttccaactcggtttggaaacgcagatggcgcggcctgccacttccccttcatcttcgagggccgctcctactctgcctgcaccaccgacggtcgctccgacggcttgccctggtgcagtaccacggccaactacgacaccgacgaccggtttggcttctgccccagcgagagactctacacccgggacggcaatgctgatgggaaaccctgccagtttccattcatcttccaaggccaatcctactccgcctgcaccacggacggtcgctccgacggctaccgctggtgcgccaccaccgccaactacgaccgggacaagctcttcggcttctgcccgacccgagctgactcgacggtgatggggggcaactcggcgggggagctgtgcgtcttccccttcactttcctgggtaaggagtactcgacctgtaccagcgagggccgcggagatgggcgcctctggtgcgctaccacctcgaactttgacagcgacaagaagtggggcttctgcccggaccaaggatacagtttgttcctcgtggcggcgcatgagttcggccacgcgctgggcttagatcattcctcagtgccggaggcgctcatgtaccctatgtaccgcttcactgaggggccccccttgcataaggacgacgtgaatggcatccggcacctctatggtcctcgccctgaacctgagccacggcctccaaccaccaccacaccgcagcccacggctcccccgacggtctgccccaccggaccccccactgtccacccctcagagcgccccacagctggccccacaggtcccccctcagctggccccacaggtccccccactgctggcccttctacggccactactgtgcctttgagtccggtggacgatgcctgcaacgtgaacatcttcgacgccatcgcggagattgggaaccagctgtatttgttcaaggatgggaagtactggcgattctctgagggcagggggagccggccgcagggccccttccttatcgccgacaagtggcccgcgctgccccgcaagctggactcggtctttgaggagccgctctccaagaagcttttcttcttctctgggcgccaggtgtgggtgtacacaggcgcgtcggtgctgggcccgaggcgtctggacaagctgggcctgggagccgacgtggcccaggtgaccggggccctccggagtggcagggggaagatgctgctgttcagcgggcggcgcctctggaggttcgacgtgaaggcgcagatggtggatccccggagcgccagcgaggtggaccggatgttccccggggtgcctttggacacgcacgacgtcttccagtaccgagagaaagcctatttctgccaggaccgcttctactggcgcgtgagttcccggagtgagttgaaccaggtggaccaagtgggctacgtgacctatgacatcctgcagtgccctgaggactagggctcccgtcctgctttgcagtgccatgtaaatccccactgggaccaaccctggggaaggagccagtttgccggatacaaactggtattctgttctggaggaaagggaggagtggaggtgggctgggccctctcttctcacctttgttttttgttggagtgtttctaataaacttggattctctaaccttt

SEQ ID NO: 434 - DNA, 1738 bp, Homo sapiens
cgggggggtactgtgcgagccctcaaggaggtggctgttctgtagctggagagctccgtgggtggcaggactgaacttgaacaccagaaacaacccccaagccttgtgacctgggaggcaggaggcgggtctgtctccctgggacttgggtggctgagccgaggtactcgggaccctgtcccgcgcatggcagagtggctcctcacagcctgaagctcatccttctgcacgggccagccaggccagcacagaggcaccagggcagcagtgcacacaggtccccggggaccccaccatgtggagcggatggtggctgtggccccttgtggccgtctgcactgcagacttctttcgggacgaggcagagaggatcatgagggactcccctgtcattgatgggcacaatgacctcccctggcagctgctggatatgttcaacaaccggctgcaggacgagagggccaacctgaccaccttggccggcacacacaccaacatccccaagctgagggccggctttgtgggaggccagttctggtccgtgtacacgccctgcgacacccagaacaaagacgccgtgcggaggacgctggagcagatggacgtggtccaccgcatgtgccggatgtacccggagaccttcctgtatgtcaccagcagtgcaggcattcggcaggccttccgggaagggaaggtggccagcctgatcggcgtggagggcggccactccattgacagcagtttgggcgtcctgcgggcactctatcagctgggcatgcggtacctgaccctcacccacagctgcaacacgccctgggctgacaactggctggtggacacgggagacagcgagccccagagccaaggcttgtcaccctttgggcagcgtgtggtgaaggagctgaaccgtctgggggtcctcatcgacttggctcacgtgtctgtggccaccatgaaggccaccctgcagctgtccagagccccggtcatcttcagccactcctcggcctacagcgtgtgcgcaagccggcgcaacgtgcctgacgacgtcctgaggctggtgaaacagacagacagcctggtgatggtgaacttctacaacaattacatttcctgcaccaacaaggccaacctgtcccaagtggccgaccatctggatcacatcaaggaggtggcaggagccagagccgtgggttttggtggggactttgatggtgttccaagggtccctgaggggctggaggacgtctccaagtatccagacctgatcgctgagctgctcaggaggaactggacggaggcggaggtcaagggcgcactggctgacaacctgctgagggtcttcgaggctgtggaacaggccagcaacctcacacaggctcccgaggaggagcccatcccgctggaccagctgggtggctcctgcaggacccattacggctactcctctggggcttccagcctccatcgccactgggggctcctgctggcctccctcgctcccctggtcctctgtctgtctctcctgtgaaacctgggagaccagagtcccctttagggttcccggagctccgggaagacccgcccatcccaggactccagatgccaggagccctgctgcccacatgcaaggaccagcatctcctgagaggacgcctgggcttacctggggggcaggatgcctggggacagttcaggacacacacacagtaggcccgcaataaaagcaacacccctt

SEQ ID NO: 435 - DNA, 4251 bp, Homo sapiens
gaattcctgggctcaagtgatcctctcatgtcagtctcccaaagtgctgggatgacaggcttgagccaccacaccaggcccatcatcagtttttatataaagaaaaaaaaaccttaaaattgttaggcaaatactatgacaaattgtaatatatattcttacatttcagatttttattttttaaactgtataagaattgattaataaataaaatttagtattaatctgtcttttaaaaccatatataaagtttatcaaatagcttataacttcttgcaactgaatttttgtattcaatgttatggctttgatactagtccaagttgaaatatagatatctactttattcgatttaaattctgtttagtattttattatattttgttaatccatttgtcccaattcatatacttatctctctttctgtgaatattcaggttagttttttcttcctaattttgcattctgattggcttttattccctgaattataaatgactattctatgatgattctggtaaatactcaatttcaccacacaatctttgacttcatactaacaaacagttgacttcaaatggacaatttcaatgaaggctgacttcatatttagctcctttaagcttccttaggcatcagctctctacaattctcacattgagaatatgtgtattttgttagctcaaaccttgttagacatgttaaatgtttagaaatataaatttaacctaccccttgaggtaggtcttgagaggtttgtgagcctaaaaagacatggaggaaccacttattgccacaagcacattgttctaaattatttggaatcagttaattcttccccatctcctacccatgcctgacaccaaagaggagcctctaaatttacagggaatacaaggaagtctactgttctctgctcctctctgggttattagggcacatgggagccctcagttgttttctgctgagcaagagcaaagtccaccttggacttagacagcttgccaaattttttgccagaaggggacctgagttgtgaccactcccagtgtgtgccgggaaaaggctcatactggtgccagaatctcttactgtcaatgctcccaaaactcaccgcttgcccccaccccttttgcttaaatgacgtggttcttatctcagatcctgatataaagctcctacagctacctggcctgagaagccaactcagactcagccaacaggtaagtgggcattacaggagaagggcgtctctaacatgcactgtagatctaaaatcttcgggaagatacagcatgagtttctgtccaagaggttttagctgtaaggaagcctcagtgggatccaaagttgtttttcagttactgagtctgtataatccccactctcaagagaaacatttgaaggtgtgggtgtctcagaggaccttcctggtctcagaaattctgagaggaggttttaaggaaggtaataggtgctttgctctccatctctcagaacccccttctctgtgttctcctatagagattgttgatttgcctcttaagcaagagattcattgcagctcagcatggctcagaccagctcatacttcatgctgatctcctgcctgatgtttctgtctcagagccaaggtaagatctcttttccaccaaccaactctttctagccctgaagacttcactctatccccaagcatacgggtctacttgaaaaaaaaaaaaaagcagagtcactgttaagggttgttttgtggtgtttagtgatctttattgcttatctcttcacatttatatacatccacacctcattaaggagttggagctagaatttaaaatgaccccttataagcaactgctgcagctggcatgagtttatctgattaaatttatacgtgatggtggatttggggatgtctgtgtgtagacagtcactaatggggtggagaactgaagagagccttgtgttcagggaaaccaagtcaggcttgagaaagtagaaggctgagtccttcaaggtagaagagcctgagctccagacataaaagggaaactggagacttgtttctttggcctattcattctgttttttttcccctgatcaaagaaaccaaagacagaagatgtaggatgcaggagcaatagtgagcagtcatcccataatagactggattcttctgtttctataaaggaacctcagaagctcttacctcaccttcaagccttttccttaccctgagagcctcctttaattgtctcttctttttcaggccaagaggcccagacagagttgccccaggcccggatcagctgcccagaaggcaccaatgcctatcgctcctactgctactactttaatgaagaccgcgagacctgggttgatgcagatgtgagtgaggagagcagtgtgggaagggagactcatgaagggaggggaagctgccactctccagtgtgttcagtggctgcaatgagatgagactgaaccccttgctatactatcatcagccccaaactttccaatctactttatcccattattcagcacattcccagcacaaagaacctggtggtcagtgacagcatcatcacggacattactctgctgtcctttttctgacccgtcctcttggaggactcagtatatccgtcacaacttcctcctccactgagtgctccattttcttctgcaacagctctattgccagaacatgaattcgggcaacctggtgtctgtgctcacccaggccgagggtgcctttgtggcctcactgattaaggagagtggcactgatgacttcaatgtctggattgccctccatgaccccaaaaaggtaggctgcagccttctttatctcctaatgatcaggtttgagaagtaagaaggaggttcaagttctggtctcttaagtaccagcttttatcgctttccagaaatcaggctgtttacagatcctctaatgtcctgtgtagcaaggtgcactgtagatgattggagatataagtggaaggctgaatttcctaggtgttcttgtcattcatgaataaacttattctgttttcagtcaacaaagcatctttatgcaccaacttcttacctattttgttactgtcagagtcacaagagagactagattgccgactatataagaaaggagacttgtggtaaaaatctgctgctgtactgctggcatttgggaacctggtagtatactaaataatataatatatcaacaactaatggtcagccaatgctatgctggatatgagggtcctgggccacaaagacaaaaaatcaggaaccactttttaagtgagatactttgggtctctgtcaaattcataacacttatttcttggtggaatacagttaatgagttggacagttcaggaaagaagtttagagcaatagcaaaggaaaggaaacaatatttagcaaggtttattcttcctttgtgtcttagcatgtttctgagtgtgcacacaggcccagtgattccatgtatttttgagtgaccactgcctctgttctggcccttccccatctagaaccgccgctggcactggagcagtgggtccctggtctcctacaagtcctggggcattggagccccaagcagtgttaatcctggctactgtgtgagcctgacctcaagcacaggtgagaggcagagaatccatccacctgtttctgttctctcctgcttagctccagggatggaactgggactgggatagaggaaaggtgaactcctcattaaggaaatggatgtttggtttttgtcctgagtcctaaagccaggagggtcatactctttcgggtctcccagttgtaactcttctcattgacttataggattccagaaatggaaggatgtgccttgtgaagacaagttctcctttgtctgcaagttcaaaaactagaggcagctggaaaatacatgtctagaactgatccagcaattacaacggagtcaaaaattaaaccggaccatctctccaactcaactcaacctggacactctcttctctgctgagtttgccttgttaatcttcaatagttttacctaccccagtctttggaaccctaaataataaaaataaacatgtttccactattgtgctgtcttactgtgtctgctatttccacagctgatgcctgggtggttgagatgagagtgattacaacaaagcttgctctggcctatccacttcttaaaagtccatccgcataccatgcatattggaattc

SEQ ID NO: 436 - DNA, 806 bp, Homo sapiens
tcccctccccaccacagctgtagtgcagtccaccgtctccagtggctatggcggtgccagcggtgtcggcagtggcttaggcctgggtggaggaagcagctactcctatggcagtggtcttggcgttggaggcggctttagttccagcagcggcagagccactgggggtggcctcagctctgttggaggcggcagttccaccatcaagtacaccaccacctcctcctccagcaggaagagctacaagcactgaagctgtgccgccagctctcagtcccacagctctcaggcccctctctggcagcagagccctctcctcaggttgcttgtcctcccctggcctccagtctcccctgccctcccgggtagagctgggatgccctcacttttcttctcatcaatactgttccactgagctcctgttgcttaccatcaagtcaacagttatcagcactcagacatgcgaatgtcctttttagttcccgtattattacaggtatctgagtctgccataattctgagaagaaaaatgacctatatcccccataagaactgaaactcagtctaggagttctcatctgacaagtcagttgtcctgatcttctcttgcagtgtcctgaatggcaagtagtgtaccttctagtgcagtctgcattcctgcactgctttctctgctctctttgccttcttttgttctgtgtgaataaagcatattgagaatgtgaacatgttgtgttagattgtattgctgaccacttcctggtttagaaacattcgcaccccacaaatggtttcttatctttggg

SEQ ID NO: 437 - DNA, 2167 bp, Homo sapiens
ctgcaggaaccaatacccataggctatttgtataaatgggccatggggcctcccagctggaggctggctggtgccacgagggtcccacaggcatgggtgtccttcctatatcacatggccttcactgagactggtatatggattgcacctatcagagaccaaggacaggacctccctggaaatctctgaggacctggcctgtgatccagttgctgccttgtcctcttcctgctatgtcatggcttatcttctttcacccattcattcattcattcattcattcagcagtattagtcaatgtctcttgatatgcctggcacctgctagatggtccccgagtttaccattagtggaaaagacatttaagaaattcaccaagggctctatgagaggccatacacggtggacctgactagggtgtggcttccctgaggagctgaagttgcccagaggcccagagaaggggagctgagcacgtttgaaccactgaacctgctctggacctcgcctccttccttcggtgcctcccagcatcctatcctctttaaagagcaggggttcagggaagttccctggatggtgattcgcaggggcagctcccctctcacctgccgcatgactaccccgccccatctcaaacacacaagctcacgcatgcgggactggagcccttgaggacatgtggcccaaagacaggaggtacaggggctcagtgcgtgcagtggaatgaactgggcttcatctctggaagggtaaggggccatcttccgggttcaccgccgcatccccacccccggcacagcgcctcctggcgactaacatcggtgacttagtgaaaggactaagaaagacccgaggcgaggccggaacaggccgatttctagccgccaagtggagaacaggttggagcggtgcgccgggcttagcggcggttgctggaggaacgggcggagtcgcccagggtcctgccctgcgggggtcgagccgaggcaggcggtgacttccccactcggggcggagccgcagcctcgcgggggcggggcctggcgccggcggtggcgtcacaaaaggcgggaccacagtggtgtccgagaagtcaggcacgtagctcagcggcggccgcggcgcgtgcgtctgtgcctctgcgcgggtctcctggtccttctgccatcatgccgatgttcatcgtaaacaccaacgtgccccgcgcctccgtgccggacgggttcctctccgagctcacccagcagctggcgcaggccaccggcaagcccccccaggtttgccgggaggggacaggaagaggggggtgcccaccggacgaggggttccgcgctgggagctggggaggcgactcctgaacggagctggggggcggggcggggggaggacggtggctcgggcccgaagtggacgttcggggcccgacgaggtcgctggggcgggctgaccgcgccctttcctcgcagtacatcgcggtgcacgtggtcccggaccagctcatggccttcggcggctccagcgagccgtgcgcgctctgcagcctgcacagcatcggcaagatcggcggcgcgcagaaccgctcctacagcaagctgctgtgcggcctgctggccgagcgcctgcgcatcagcccggacaggtacgcggagtcgcggaggggcgggggaggggcggcggcgcgcggccaggcccgggactgagccacccgctgagtccggcctcctccccccgcagggtctacatcaactattacgacatgaacgcggccaatgtgggctggaacaactccaccttcgcctaagagccgcagggacccacgctgtctgcgctggctccacccgggaacccgccgcacgctgtgttctaggcccgcccaccccaaccttctggtggggagaaataaacggtttagagactaggagtgcctcggggttccttggcttgcgggaggaattggtgcagagccgggacattggggagcgaggtcgggaaacggtgttgggggcgggggtcagggccgggttgctctcctcgaacctgctgttcgggagcccttttgtccagcctgtccctcctacgctcctaacagaggagccccagtgtctttccattctatggcgtacgaagggatgaggagaagttggcactctgccctgggctgcag

SEQ ID NO: 438 - DNA, 309 bp, Homo sapiens
ctctcaataggaaagagaagtaattcaagaaagaaatagaaacttcaggcagaacatccattcattcattcattggattgtatatcattgttgcacaatcagaattgataagcactgttcttccactccatttagcaattatgtcacccttttttattgcagttggtttttgaatgtctttcactccttttaaggataaactcctttatggtgtgactgtgtcttattcatctatacttgcagtgggtagatgtcaataaatgttacatacacaaataaataaaatgtttattccatggtaaatttatt

SEQ ID NO: 439 - DNA, 1778 bp, Homo sapiens
tagaagtttacaatgaagtttcttctaatactgctcctgcaggccactgcttctggagctcttcccctgaacagctctacaagcctggaaaaaaataatgtgctatttggtgagagatacttagaaaaattttatggccttgagataaacaaacttccagtgacaaaaatgaaatatagtggaaacttaatgaaggaaaaaatccaagaaatgcagcacttcttgggtctgaaagtgaccgggcaactggacacatctaccctggagatgatgcacgcacctcgatgtggagtccccgatctccatcatttcagggaaatgccaggggggcccgtatggaggaaacattatatcacctacagaatcaataattacacacctgacatgaaccgtgaggatgttgactacgcaatccggaaagctttccaagtatggagtaatgttacccccttgaaattcagcaagattaacacaggcatggctgacattttggtggtttttgcccgtggagctcatggagacttccatgcttttgatggcaaaggtggaatcctagcccatgcttttggacctggatctggcattggaggggatgcacatttcgatgaggacgaattctggactacacattcaggaggcacaaacttgttcctcactgctgttcacgagattggccattccttaggtcttggccattctagtgatccaaaggctgtaatgttccccacctacaaatatgtcgacatcaacacatttcgcctctctgctgatgacatacgtggcattcagtccctgtatggagacccaaaagagaaccaacgcttgccaaatcctgacaattcagaaccagctctctgtgaccccaatttgagttttgatgctgtcactaccgtgggaaataagatctttttcttcaaagacaggttcttctggctgaaggtttctgagagaccaaagaccagtgttaatttaatttcttccttatggccaaccttgccatctggcattgaagctgcttatgaaattgaagccagaaatcaagtttttctttttaaagatgacaaatactggttaattagcaatttaagaccagagccaaattatcccaagagcatacattcttttggttttcctaactttgtgaaaaaaattgatgcagctgtttttaacccacgtttttataggacctacttctttgtagataaccagtattggaggtatgatgaaaggagacagatgatggaccctggttatcccaaactgattaccaagaacttccaaggaatcgggcctaaaattgatgcagtcttctattctaaaaacaaatactactatttcttccaaggatctaaccaatttgaatatgacttcctactccaacgtatcaccaaaacactgaaaagcaatagctggtttggttgttagaaatggtgtaattaatggtttttgttagttcacttcagcttaataagtatttattgcatatttgctatgtcctcagtgtaccactacttagagatatgtatcataaaaataaaatctgtaaaccataggtaatgattatataaaatacataatatttttcaattttgaaaactctaattgtccattcttgcttgactctactattaagtttgaaaatagttaccttcaaagcaagataattctatttgaagcatgctctgtaagttgcttcctaacatccttggactgagaaattatacttacttctggcataactaaaattaagtatatatattttggctcaaataaaattg

SEQ ID NO: 440 - DNA, 3018 bp, Homo sapiens
ctcctcacaggtgtgtctctagtcctcgtggttgcctgccccactccctgccgagacgcctgccagaaaggtcacctatcctgaaccccagcaagcctgaaacagctcagccaagcaccctgcgatggaagctgcagatgcctccaggagcaacgggtcgagcccagaagccagggatgcccggagcccgtcgggccccagtggcagcctggagaatggcaccaaggctgacggcaaggatgccaagaccaccaacgggcacggcggggaggcagctgagggcaagagcctgggcagcgccctgaagccaggggaaggtaggagcgccctgttcgcgggcaatgagtggcggcgacccatcatccagtttgtcgagtccggggacgacaagaactccaactacttcagcatggactctatggaaggcaagaggtcgccgtacgcagggctccagctgggggctgccaagaagccacccgttacctttgccgaaaagggcgacgtgcgcaagtccattttctcggagtcccggaagcccacggtgtccatcatggagcccggggagacccggcggaacagctacccccgggccgacacgggccttttttcacggtccaagtccggctccgaggaggtgctgtgcgactcctgcatcggcaacaagcagaaggcggtcaagtcctgcctggtgtgccaggcctccttctgcgagctgcatctcaagccccacctggagggcgccgccttccgagaccaccagctgctcgagcccatccgggactttgaggcccgcaagtgtcccgtgcatggcaagacgatggagctcttctgccagaccgaccagacctgcatctgctacctttgcatgttccaggagcacaagaatcatagcaccgtgacagtggaggaggccaaggccgagaaggagacggagctgtcactgcaaaaggagcagctgcagctcaagatcattgagattgaggatgaagctgagaagtggcagaaggagaaggaccgcatcaagagcttcaccaccaatgagaaggccatcctggagcagaacttccgggacctggtgcgggacctggagaagcaaaaggaggaagtgagggctgcgctggagcagcgggagcaggatgctgtggaccaagtgaaggtgatcatggatgctctggatgagagagccaaggtgctgcatgaggacaagcagacccgggagcagctgcatagcatcagcgactctgtgttgtttctgcaggaatttggtgcattgatgagcaattactctctccccccacccctgcccacctatcatgtcctgctggagggggagggcctgggacagtcactaggcaacttcaaggacgacctgctcaatgtatgcatgcgccacgttgagaagatgtgcaaggcggacctgagccgtaacttcattgagaggaaccacatggagaacggtggtgaccatcgctatgtgaacaactacacgaacagcttcgggggtgagtggagtgcaccggacaccatgaagagatactccatgtacctgacacccaaaggtggggtccggacatcataccagccctcgtctcctggccgcttcaccaaggagaccacccagaagaatttcaacaatctctatggcaccaaaggtaactacacctcccgggtctgggagtactcctccagcattcagaactctgacaatgacctgcccgtcgtccaaggcagctcctccttctccctgaaaggctatccctccctcatgcggagccaaagccccaaggcccagccccagacttggaaatctggcaagcagactatgctgtctcactaccggccattctacgtcaacaaaggcaacgggattgggtccaacgaagccccatgagctcctggcggaaggaacgaggcgccacacccctgctcttcctcctgaccctgctgctcttgccttctaagctactgtgcttgtctgggtgggagggagcctggtcctgcacctgccctctgcagccctctgccagcctcttgggggcagttccggcctctccgacttccccactggccacactccattcagactcctttcctgccttgtgacctcagatggtcaccatcattcctgtgctcagaggccaacccatcacaggggtgagataggttggggcctgccctaacccgccagcctcctcctctcgggctggatctgggggctagcagtgagtacccgcatggtatcagcctgcctctcccgcccacgccctgctgtctccaggcctatagacgtttctctccaaggccctatcccccaatgttgtcagcagatgcctggacagcacagccacccatctcccattcacatggcccacctcctgcttcccagaggactggccctacgtgctctctctcgtcctacctatcaatgcccagcatggcagaacctgcagtggccaagggctgcagatggaaacctctcagtgtcttgacatcaccctacccaggcggtgggtctccaccacagccactttgagtctgtggtccctggagggtggcttctcctgactggcaggatgaccttagccaagatattcctctgttccctctgctgagataaagaattcccttaacatgatataatccacccatgcaaatagctactggcccagctaccatttaccatttgcctacagaatttcattcagtctacactttggcattctctctggcgatggagtgtggctgggctgaccgcaaaaggtgccttacacactgcccccaccctcagccgttgccccatcagaggctgcctcctccttctgattaccccccatgttgcatatcagggtgctcaaggattggagaggagacaaaaccaggagcagcacagtggggacatctcccgtctcaacagccccaggcctatgggggctctggaaggatgggccagcttgcaggggttggggagggagacatccagcttgggctttcccctttggaataaaccattggtctgtc

SEQ ID NO: 441 - DNA, 2439 bp, Homo sapiens
cagcacccagctccccgccaccgccatggtccccgacaccgcctgcgttcttctgctcaccctggctgccctcggcgcgtccggacagggccagagcccgttgggctcagacctgggcccgcagatgcttcgggaactgcaggaaaccaacgcggcgctgcaggacgtgcgggactggctgcggcagcaggtcagggagatcacgttcctgaaaaacacggtgatggagtgtgacgcgtgcgggatgcagcagtcagtacgcaccggcctacccagcgtgcggcccctgctccactgcgcgcccggcttctgcttccccggcgtggcctgcatccagacggagagcggcggccgctgcggcccctgccccgcgggcttcacgggcaacggctcgcactgcaccgacgtcaacgagtgcaacgcccacccctgcttcccccgagtccgctgtatcaacaccagcccggggttccgctgcgaggcttgcccgccggggtacagcggccccacccaccagggcgtggggctggctttcgccaaggccaacaagcaggtttgcacggacatcaacgagtgtgagaccgggcaacataactgcgtccccaactccgtgtgcatcaacacccggggctccttccagtgcggcccgtgccagcccggcttcgtgggcgaccaggcgtccggctgccagcgcggcgcacagcgcttctgccccgacggctcgcccagcgagtgccacgagcatgcagactgcgtcctagagcgcgatggctcgcggtcgtgcgtgtgtcgcgttggctgggccggcaacgggatcctctgtggtcgcgacactgacctagacggcttcccggacgagaagctgcgctgcccggagccgcagtgccgtaaggacaactgcgtgactgtgcccaactcagggcaggaggatgtggaccgcgatggcatcggagacgcctgcgatccggatgccgacggggacggggtccccaatgaaaaggacaactgcccgctggtgcggaacccagaccagcgcaacacggacgaggacaagtggggcgatgcgtgcgacaactgccggtcccagaagaacgacgaccaaaaggacacagaccaggacggccggggcgatgcgtgcgacgacgacatcgacggcgaccggatccgcaaccaggccgacaactgccctagggtacccaactcagaccagaaggacagtgatggcgatggtataggggatgcctgtgacaactgtccccagaagagcaacccggatcaggcggatgtggaccacgactttgtgggagatgcttgtgacagcgatcaagaccaggatggagacggacatcaggactctcgggacaactgtcccacggtgcctaacagtgcccaggaggactcagaccacgatggccagggtgatgcctgcgacgacgacgacgacaatgacggagtccctgacagtcgggacaactgccgcctggtgcctaaccccggccaggaggacgcggacagggacggcgtgggcgacgtgtgccaggacgactttgatgcagacaaggtggtagacaagatcgacgtgtgtccggagaacgctgaagtcacgctcaccgacttcagggccttccagacagtcgtgctggacccggagggtgacgcgcagattgaccccaactgggtggtgctcaaccagggaagggagatcgtgcagacaatgaacagcgacccaggcctggctgtgggttacactgccttcaatggcgtggacttcgagggcacgttccatgtgaacacggtcacggatgacgactatgcgggcttcatctttggctaccaggacagctccagcttctacgtggtcatgtggaagcagatggagcaaacgtattggcaggcgaaccccttccgtgctgtggccgagcctggcatccaactcaaggctgtgaagtcttccacaggccccggggaacagctgcggaacgctctgtggcatacaggagacacagagtcccaggtgcggctgctgtggaaggacccgcgaaacgtgggttggaaggacaagaagtcctatcgttggttcctgcagcaccggccccaagtgggctacatcagggtgcgattctatgagggccctgagctggtggccgacagcaacgtggtcttggacacaaccatgcggggtggccgcctgggggtcttctgcttctcccaggagaacatcatctgggccaacctgcgttaccgctgcaatgacaccatcccagaggactatgagacccatcagctgcggcaagcctagggaccagggtgaggacccgccggatgacagccaccctcaccgcggctggatgggggctctgcacccagcccaaggggtggccgtcctgagggggaagtgagaagggctcagagaggacaaaataaagtgtgtgtgcaggg

SEQ ID NO: 442 - DNA, 1338 bp, Homo sapiens
ggatcctgccagagcctcctcccacctggaggggtcccagcgtccaccttccctgccccagcccccctcctcgaggtactgggaggctggataaagtcttcggctgggccacaccccaccccaaattctccctgtcccaccctagtgcccaggccaccccggcctgctcccttccgcaaggcacctcaccttctgtgcccagaccattagccaacgcggtgaccttgaccccggcccaggccctgctaatgaagaggaaagcccgtacgcactcggcctgacccacggcgaccctctgtgaccaatcatactaccaacctcttaaacagagctccaccgacgcaatgcccaggcataaaaaggccaggccgagagaccgccaccagtcacggaccctggacccagcgcacccgcaccatggccggccccagcctcgcttgctgtctgctcggcctcctggcgctgacctccgcctgctacatccagaactgccccctgggaggcaagagggccgcgccggacctcgacgtgcgcaaggtgagtccccagccctggtcccgcggcgctccggggagggagggacccgcagccacaggggcgcgccccgctccggcctcgcctgagaactccaggagctgagcggattttgacgccccgcccttgaccgcggtcgaggcccccacggcgccccagcgtctcagccccgctgtccccgcccgaactccgaaccccggaccccagcatccttgcccggcgcaccccggccggcctcgcagggtcctccgagcgagtccccagcgccgccccgcgtcccgctcaccccgcccgtcccccgagtgcctcccctgcggccccgggggcaaaggccgctgcttcgggcccaatatctgctgcgcggaagagctgggctgcttcgtgggcaccgccgaagcgctgcgctgccaggaggagaactacctgccgtcgccctgccagtccggccagaaggcgtgcgggagcgggggccgctgcgccttgggcctctgctgcagcccgggtgagcggggcaaggcgctccggggccagggggaggcgggcgggggtgcggccgggattcccctgactccacctcttcctccagacggctgccacgccgaccctgcctgcgacgcggaagccaccttctcccagcgctgaaacttgatggctccgaacaccctcgaagcgcgccactcgcttcccccatagccaccccagaaatggtgaaaataaaataaagcaggtttttctcctctaccttgactcgtgtctaagtgccagaaatgggacggggagggggcattgtgggactggaagatc

SEQ ID NO: 443 - DNA, 7011 bp, Homo sapiens
cgggccgcatcagccctcctcctgtttgcgctccccagcgtgcaatttatttggggggctaccggggattgaacggagcgggcgagcgctgccaggaggtggggccggccccacctgtcgactgcccgtagtaggcagggagagggcggggtttgtcccatagggcccgccccccagtccctgggtcccgggcgcgcgacgagatataaggcagtcaggaaacaatgcgcctgcagctcgcgctcccgcgccgatcccgagagcgtccgggccgccgtgcgcgagcgagggagggcgcgcgcgcggggggggcgcgctcgtgagtgcgggccgcgctctcggcggcgcgcatgtgcgtgtgtgctggctgccgggctgccccgagccggcggggagccggtccgctccaggtggcgggcggctggagcgaggtgaggctgcgggtggccagggcacgggcgcgggtcccgcggtgcgggctggctgcaggctgccttctgggcacggcgcgcccccgcccggccccgccgggccctgggagctgcgctccgggcggcgctggcaaagtttgctttgaactcgctgcccacagtcgggtccgcgcgctgcgattggcttcccctaccactctgacccggggcccggcttcccgggacgcgaggactgggcgcaggctgcaagctggtggggttggggaggaacgagagcccggcagccgactgtgccgagggacccggggacacctccttcgcccggccggcacccggtcagcacgtccccccttccctcccgcagggagcggacatggactacgactcgtaccagcactatttctacgactatgactgcggggaggatttctaccgctccacggcgcccagcgaggacatctggaagaaattcgagctggtgccatcgccccccacgtcgccgccctggggcttgggtcccggcgcaggggacccggcccccgggattggtcccccggagccgtggcccggagggtgcaccggagacgaagcggaatcccggggccactcgaaaggctggggcaggaactacgcctccatcatacgccgtgactgcatgtggagcggcttctcggcccgggaacggctggagagagctgtgagcgaccggctcgctcctggcgcgccccgggggaacccgcccaaggcgtccgccgccccggactgcactcccagcctcgaagccggcaacccggcgcccgccgccccctgtccgctgggcgaacccaagacccaggcctgctccgggtccgagagcccaagcgactcgggtaaggacctccccgagccatccaagagggggccaccccatgggtggccaaagctctgcccctgcctgaggtcaggcattggctcttctcaagctcttgggccatctccgcctctctttggctgaagctgcccgtgtagtccccaaccgtgtctgtctggcacgtgggtgtgttggtaaacagtttggaaaagtggcgtgggagccagcctccctttgatgattattggagccccaggggacaagggatttgaggtgagggttggcgcttagagaggacaatactggggttggactgtaagggattgaagggggtaccttaagagacactccaaacctgaagtttttttgctgctgcctctttccctaggaaactcacactcccctagggggagaagaagccgagagccttttgtgcaaagccaaaaccttcgtccttttaaaaacctaggtctccagttggctttactttaaaatgccaataataaatgccctcttctcgtgcctccccaccaccacttaccactcgtgcatccctgagacagggagggaagaatgaacactccccattaacagatggaaaaactgaggcttagagatagacaatcactacaagtcagctccagctttctgccatctagccagcccctcttccccaatgctccatcccaaccaggcacctcttccttgatgtttggggtctttgtggtagcttatcttagaagcactacaccttgccttgctgtttgtcctgagatggaaaagtgtccttcttgctccccctcaatagatctccagcgtcagctgctccctggcattcaacaaatattcactggcccctactttgtggcaatctgtgggctacatgctggggtcaaggcagtagaactccaggccctcctctcccatccttgatgcaagtgcaacctcgctgagggcagactggggcatcctgtgccactaaactacattgttcttattctggcatcttagacctccacacccgtgagaaatcctggagagggtatttttgtagagtgtagactgtggctagtgacaaataaattaggaccaagaaagctcactgtagcttttaggaataacttttacacgaccatttgatagggaactggggaatggggtatggaagttttcctacacttgagagaaaaaataggataacaaaaattaaaagtctttttttcctggtccactgtgttaaggtcatttttaaccagcttgctttctacaccaagagtttatgtttgtttaatggctggaaagagaatcttgagatcaaaaaaccaataaagatgtatctctacaacggctggtggagtggtagagtggaaagagcattgctttggaagttggaacattttagtttgagatccagaacgttacaaaggtgatatgtggacttcgctgatctgggcctcagtttccccatttgcacacgatggggttggacttgattgtcctgctgatgacatttccttgtctggatagagtaagacactactctctgaaagggagaatggtgtgcttaaattatttctttcttagatagaatcttcctgagccacgaggcttaacactgaaaattaaaggtttgggatgtaggaaagcctgctgaatcattttctaacctaccctttaacctgaacctgtttgtgagcttctagttcactcacaggccacatggcctggaacaaaatgcaacagattgcaaacaatgaggcggggggtggggaaagtgattggcagcagagctcacccaataggggctaggggctgggtaagacagaattccaaacacagcgtaatcagccaatcatgggctttggggccaggagggctgaatggtcaggtttattaatggagaaataatgcgattgtccacacaatggaagccttcctgacaaaggggctcaagcttcctgatatgcaaagaagctgagaacggagctcttcctttgccgaggccgagatccattaaggtcggacttctgtgtggaggctgcaaaatgtgtggagcaggaggagacttttctcccaattgcccctctcctggttaggttaacctaagagaccttcaagccagtgaatgagaagggcgtgtccaggtgtctccaggtctctggtgttatgagccccatatctgggacattctgctgcccagtctctgcctctggtgcaggtagtttggaaatggtcgcttgtacctttgtgaagttcctgcagcttcgccgacctatgattacaaatctaaccttctagtccagggaaggaggtggggcaggcgacctataaatgatggatgactttagaaacccattgaacccaggagcaaaatgctcctaagggaaaccctttccctcccctctgtgggtgaagagggatgggttgtagccctcccttctctgaatcttcagctgaaagggatggcagaatagagaggtgggggaataataggatttataacttgtgaaaagtaacaattccccaagtgcaggctgtgctgggcaggaacaaagggcagctctgcccacagacccctcatttacaattctgatggggcatgaaagagcccgactggggaagatctttatagctaaactttgtcccaggccggtagctctttctctccaacccctccgtgggggaggggagagcctttgcagactgggggctgttggcttgggtctgccttttgttcttatctaagccttgctgtgcaaaaggaaattggagaatattttccttcttgctaatgtcccctcctttccttcactgtgcccttaccacattacaaatgaatcagctttctgctcacctcgatttgtatatatctaaattggaaaaatgtctcctaccttcccaagcaccagcgtagacagctaaagctgtagggtctatgtttgtgtttctcatgggatgtgtttcttctcttgatctcttttctcggacagagaatgaagaaattgatgttgtgacagtagagaagaggcagtctctgggtattcggaagccggtcaccatcacggtgcgagcagaccccctggatccctgcatgaagcatttccacatctccatccatcagcaacagcacaactatgctgcccgttttcctccagaaagctgctcccaagaagaggcttcagagaggggtccccaagaagaggttctggagagagatgctgcaggggaaaaggaagatgaggaggatgaagagattgtgagtcccccacctgtagaaagtgaggctgcccagtcctgccaccccaaacctgtcagttctgatactgaggatgtgaccaagaggaagaatcacaacttcctggagcgcaagaggcggaatgacctgcgttcgcgattcttggcgctgagggaccaggtgcccaccctggccagctgctccaaggcccccaaagtagtgatcctaagcaaggccttggaatacttgcaagccctggtgggggctgagaagaggatggctacagagaaaagacagctccgatgccggcagcagcagttgcagaaaagaattgcatacctcagtggctactaactgaccaaaaagcctgacagttctgtcttacgaagacacaagtttattttttaacctccctctcccctttagtaatttgcacattttggttatggtgggacagtctggacagtagatcccagaatgcattgcagccggtgcacacacaataaaggcttgcattcttggaaaccttgaaacccagctctccctcttccctgactcatgggagtgctgtatgttctctggcgcctttggcttcccagcaggcagctgactgaggagccttggggtctgcctagctcactagctctgaagaaaaggctgacagatgctatgcaacaggtggtggatgttgtcaggggctccagcctgcatgaaatctcacactctgcatgagctttaggctaggaaaggatgctcccaactggtgtctctggggtgatgcaaggacagctgggcctggatgctctccctgaggctcctttttccagaagacacacgagctgtcttgggtgaagacaagcttgcagacttgatcaacattgaccattacctcactgtcagacactttacagtagccaaggagttggaaacctttatgtattatgatgttagctgacccccttcctcccactcccaatgctgcgaccctgggaacacttaaaaagcttggcctctagattctttgtctcagagccctctgggctctctcctctgagggagggacctttctttcctcacaagggacttttttgttccattatgccttgttatgcaatgggctctacagcaccctttcccacaggtcagaaatatttccccaagacacagggaaatcggtcctagcctggggcctggggatagcttggagtcctggcccatgaacttgatccctgcccaggtgttttccgaggggcacttgaggcccagtcttttctcaaggcaggtgtaagacactcagagggagaactgtactgctgcctctttcccaccttcctcatctcaatccttgagcggcaagtttgaagttcttctggaaccatgcaaatctgtcctcctcatgcaattccaaggagcttgctggctctgcagccacctctgggccccttccagcctgccatgaatcagatatctttcccagaatctgggcgtttctgaagttttggggagagctgttgggactcatccagtgctccagaaggtggacttgcttctggggggttttaaaggagcctccaggagatatgcttagccaaccatgatggattttaccccagctggactcggcagctccaagtggaatccacgtgcagcttctagtctgggaaagtcacccaacctagcagttgtcatgtgggtaacctcaggcacctctaagcctgtcctggaagaaggaccagcagcccctccagaactctgcccaggacagcaggtgcctgctggctctgggtttggaagtttggggtgggtagggggtggtaagtactatatatggctctggaaaaccagctgctacttccaaatctattgtccataatggtttctttctgaggttgcttcttggcctcagaggaccccaggggatgtttggaaatagcctctctacccttctggagcatggtttacaaaagccagctgacttctggaattgtctatggaggacagtttgggtgtaggttactgatgtctcaactgaatagcttgtgttttataagctgctgttggctattatgctgggggagtcttttttttttatattgtatttttgtatgccttttgcaaagtggtgttaactgtttttgtacaaggaaaaaaactcttggggcaatttcctgttgcaagggtctgatttattttgaaaggcaagttcacctgaaattttgtatttagttgtgattactgattgcctgattttaaaatgttgccttctgggacatcttctaataaaagatttctcaaacatgtcagagtgggggcagcttatgccacctgagtcctcctcaaccacggaaaactatttcagggtagccacaagtgatccagagggctgcacttctctaaccatgttgctaacctggtcattccactctgggttcctgaaatgccatttcagacatgttgaaacaatgtaggctcagtactcagtgaacacggaattc

SEQ ID NO: 444 - DNA, 3489 bp, Homo sapiens
  misc_feature (1)...(3489): n=a,t,g or c
ctgcagggccccaacaaccctcaccaaaggccaaggtggtgaccgacggacccacagcggggtggctgggggagtcgaaactcgccagtctccactccactcccaaccgtggtgccccacgcgggcctgggagagtctgtgaggccgcccaccgcttgtcagtagagtgcgcccgcgagccgtaagcacagcccggcaacatgcggtcttcagacaggaaagtggccgcgaatgggaccggggtgcccagcggctgtggggactctgtcctgcggaaaccgcggtgacgagcacaagctcggtcaactggatgggaatcggcctggggggctggcaccgcgcccaccagggggtttgcggcacttccctctgcccctcagcaccccacccctactctccaggaacgtgaggtctgagccgtgatggtggcaggaaggggccctctgtgccatccgagtccccagggacccgcagctggcccccagccatgtgcaaagtatgtgcagggcgctggcaggcagggagcagcaggcatggtgtcccctgaggggagacagtggtctgggagggagaggtcctggaccctgagggaggtgatggggcaatgctcagccctgtctccggatgccaaaggaggggtgcggggaggccgtctttggagaattccaggatgggtgctgggtgagagagacgtgtgctggaactgtccagggcggaggtgggccctgcgggggccctcgggagggccctgctctgattggccggcagggcaggggcgggaattctggcgggccaccccagttagaaaaagcccgggctaggaccgaggagcagggtgagggagggggtgggatgggtggggggtaacgggggaaactggggaagtggggaaccgaggggcaaccaggggaagatggggtgctggaggagagcttgtgggagccaaggagcaccttggacatctggagtctggcaggagtgatgacgggtggaggggctagctcgaggcagggctggtggggcctgaggccagtgaggagtgtggagtaggtgcccaggcatcgtgcagacagggcgacatcagctggggacgatgggcctgagctagggctggaaagaagggggagccaggcattcatcccggtcacttttggttacaggacgtggcagctggttggacgaggggagctggtgggcagggtttgatcccagggcctgggcaacggaggtgtagctggcagcagcgggcaggtgaggaccccatctgccgggcaggtgagtcccttccctccccaggcctcgcttccccagccttctgaaagaaggaggtttaggggatcgagggctggcggggagaagcagacaccctcccagcagaggggcaggatgggggcaggagagttagcaaaggtgacatcttctcggggggagccgagactgcgcaaggctggggggttatgggcccgttccaggcagaaagagcaagagggcagggagggagcacaggggtggccagcgtagggtccagcacgtggggtggtaccccaggcctgggtcagacagggacatggcaggggacacaggacagaggggtccccagctgccacctcacccaccgcaattcatttagtagcaggcacaggggcagctccggcacggctttctcaggcctatgccggagcctcgagggctggagagcgggaagacaggcagtgctcggggagttgcagcaggacgtcaccaggagggcgaagcggccacgggaggggggccccgggacattgcgcagcaaggaggctgcaggggctcggcctgcgggcgccggtcccacgaggcactgcggcccagggtctggtgcggagagggcccacagtggacttggtgacgctgtatgccctcaccgctcagcccctggggctggcttggcagacagtacagcatccaggggagtcaagggcatggggcgagaccagactaggcgaggcgggcggggcggagtgaatgagctctcaggagggaggatggtgcaggcaggggtgaggagcgcagcgggcggcgagcgggaggcactggcctccagagcccgtggccaaggcgggcctcgcgggcggcgacggagccgggatcggtgcctcagcgttcgggctggagacgagggtgagtttttccccctctgccaccctcagcccccacccgcccctccccacacaaccaacacgttctccccacacgactctctcgttctccccacagccaggtctccagctggggtggacgtgcccaccagctgccgaaggccaagacgccaggtccggtggacgtgacaagcaggacatgacatggtccggtgtgacggcgaggacagaggaggcgcgtccggccttcctggtgagcgtgtctgccctccctgcgtcaggacggccctgcccagaccgccccgcgccaccatctcactgccccgacctctgtcttctacagaacaccttaggctggtggggctgcggcaagaagcgggtctgtttctttacttcctccacggagtcggcacactatggctgccctctgggctcccagaacccacaacatgaaaggtgagggncttcctgccacacttggggtggggggcacgcgagaggagctgagtgggacctcaactccttccccatccacagaaatggtgctacccagctcaagcctgggcctttgaatccggacacaaaaccctctagcttggaaatgaatatgctgcactttacaaccactgcactacctgactcaggaatcggctctggaaggtgagcaccagcgctccttnggaagcctccaggcccccgagcaccctgcccccatcccacccacgtgtcgctatctctaggtgaagctagaggaaccagacctcatcagcccaacatcaaagacaccatcggaacagcagcgcccgcagcacccaccccgcaccggcgactccatcttcatggccaccccctgcggtggacggttgaccaccagccaccacatcatcccagagctgagctcctccagcgggatgacgccgtccccaccacctccctcttcttctttttcatccttctgtctctttgtttctgagctttcctgtctttccttttttctgagagattcaaagcctccacgactctgtttcccccgtcccttctgaatttaatttgcactaagtcatttgcactggttggagttgtggagacggccttgagtctcagtacgagtgtgcgtgagtgtgagccaccttggcaagtgcctgtgcagggcccggccgccctccatctgggccgggtgactgggcgccggctgtgtgcccgaggcctcaccctgccctcgcctagtctggaagctccgaccgacatcacggagcagccttcaagcattccattacgccccatctcgctctgtgcccctccccaccagggcttcagcaggagccctggactcatcatcaataaacactgttac

SEQ ID NO: 445 - DNA, 1064 bp, Homo sapiens
  misc_feature (1)...(1064): n=a,t,g or c
cacagccgggtcgcaggcacctccccngccagctctcccgcattctgcacagcttcccgacgcgtctgctgagccccatggcccacgccacgctctccgccgcccccagcaatccccggctcctgcgggtggcgctgctgctcctgctcctggtgggcagccggcgcgcagcaggagcgtccgtggtcactgaactgcgctgccagtgcttgcagacactgcagggaattcacctcaagaacatccaaagtgtgaatgtaaggtcccccggaccccactgcgcccaaaccgaagtcatagccacactcaagaatgggaagaaagcttgtctcaaccccgcatcccccatggttcagaaaatcatcgaaaagatactgaacaaggggagcaccaactgacaggagagaagtaagaagcttatcagcgtatcattgacacttcctgcagggtggtccctgcccttaccagagctgaaaatgaaaaagagaacagcagctttctagggacagctggaaagggacttaatgtgtttgactatttcttacgagggttctacttatttatgtatttatttttgaaagcttgtattttaatattttacatgctgttatttaaagatgtgagtgtgtttcatcaaacatagctcagtcctgattatttaattggaatatgatgggttttaaatgtgtcattaaactaatatttagtgggagaccataatgtgtcagccaccttgataaatgacagggtggggaactggagggtngggggattgaaatgcaagcaattagtggatcactgttagggtaagggaatgtatgtacacatctattttttatacttttttttttaaaaaagaatgtcagttgttatttattcaaattatctcacattatgtgttcaacatttttatgctgaagtttcccttagacattttatgtcttgcttgtagggcataatgccttgtttaatgtccattctgcagcgtttctctttcccttggaaaagagaatttatcattactgttacatttgtacaaatgacatgataataaaagttttatg

SEQ ID NO: 446 - DNA, 3004 bp, Homo sapiens
ctcaattggaggatcaaagttgagaaaagtaatattcgacatttttcgattcaacggagtggccaccaagacgatgtcatagaagtctgaacgagtctcagttccaatttggtagaccacttcatacatctttgttggatttcctgtgtacttggtctttgttttctcctcgatgtacattactgagccagatataagattgcttttggatgcctgcagaagccctgagcaaacaagtttattgccaccttctactgcccaaaggccagaatcagaacaggacagtgacaccgcccccacaaaggcattgatgtccgtgctttggccataattgaccctcataacaggagcaatcatttcattgaggaacttctcagaaaagccggccttttgcaaggtttcaagaagtgttcgattaagcattccaaggaagtcatctcctcctagagcatgaagtaatttttcgacactactgaaggcatagtcatgagactggtagcggtagatcctcatgaacttgtctaacacgtcctctacccacatgtgcatacggagggattgaaatccatagcgccaaactaatttaatcacgttaattatgaaccagttgctctcctcaaataccagagtctctccattatatatccccagtaggccacccagaggctgatgctcaccatggggcgcctgcaactggttgtgttgggcctcacctgctgctgggcagtggcgagtgccgcgaagctgggcgccgtgtacacagaaggtgggttcgtggaaggcgtcaataagaagctcggcctcctgggtgactctgtggacatcttcaagggcatccccttcgcagctcccaccaaggccctggaaaatcctcagccacatcctggctggcaagggaccctgaaggccaagaacttcaagaagagatgcctgcaggccaccatcacccaggacagcacctacggggatgaagactgcctgtacctcaacatttgggtgccccagggcaggaagcaagtctcccgggacctgcccgttatgatctggatctatggaggcgccttcctcatggggtccggccatggggccaacttcctcaacaactacctgtatgacggcgaggagatcgccacacgcggaaacgtcatcgtggtcaccttcaactaccgtgtcggcccccttgggttcctcagcactggggacgccaatctgccaggtaactatggtcttcgggatcagcacatggccattgcttgggtgaagaggaatatcgcggccttcgggggggaccccaacaacatcacgctcttcggggagtctgctggaggtgccagcgtctctctgcagaccctctccccctacaacaagggcctcatccggcgagccatcagccagagcggcgtggccctgagtccctgggtcatccagaaaaacccactcttctgggccaaaaaggtggctgagaaggtgggttgccctgtgggtgatgccgccaggatggcccagtgtctgaaggttactgatccccgagccctgacgctggcctataaggtgccgctggcaggcctggagtaccccatgctgcactatgtgggcttcgtccctgtcattgatggagacttcatccccgctgacccgatcaacctgtacgccaacgccgccgacatcgactatatagcaggcaccaacaacatggacggccacatcttcgccagcatcgacatgcctgccatcaacaagggcaacaagaaagtcacggaggaggacttctacaagctggtcagtgagttcacaatcaccaaggggctcagaggcgccaagacgacctttgatgtctacaccgagtcctgggcccaggacccatcccaggagaataagaagaagactgtggtggactttgagaccgatgtcctcttcctggtgcccaccgagattgccctagcccagcacagagccaatgccaagagtgccaagacctacgcctacctgttttcccatccctctcggatgcccgtctaccccaaatgggtgggggccgaccatgcagatgacattcagtacgttttcgggaagcccttcgccacccccacgggctaccggccccaagacaggacagtctctaaggccatgatcgcctactggaccaactttgccaaaacaggggaccccaacatgggcgactcggctgtgcccacacactgggaaccctacactacggaaaacagcggctacctggagatcaccaagaagatgggcagcagctccatgaagcggagcctgagaaccaacttcctgcgctactggaccctcacctatctggcgctgcccacagtgaccgaccaggaggccacccctgtgccccccacaggggactccgaggccactcccgtgccccccacgggtgactccgagaccgcccccgtgccgcccacgggtgactccggggccccccccgtgccgcccacgggtgactccggggccccccccgtgccgcccacgggtgactccggggccccccccgtgccgcccacgggtgactccggggccccccccgtgccgcccacgggtgactccggggccccccccgtgccgcccacgggtgactccggggccccccccgtgccgcccacgggtgactccggcgccccccccgtgccgcccacgggtgacgccgggcccccccccgtgccgcccacgggtgactccggcgccccccccgtgccgcccacgggtgactccggggccccccccgtgacccccacgggtgactccgagaccgcccccgtgccgcccacgggtgactccggggccccccctgtgccccccacgggtgactctgaggctgcccctgtgccccccacagatgactccaaggaagctcagatgcctgcagtcattaggttttagcgtcccatgagccttggtatcaagaggccacaagagtgggaccccaggggctcccctcccatcttgagctcttcctgaataaagcctcatacccctg

SEQ ID NO: 447 - DNA, 1065 bp, Homo sapiens
gaattaggcacgagagctccttgccagctctcctcctcgcacagccgctcgaaccgcctgctgagccccatggcccgcgccacgctctccgccgcccccagcaatccccggctcctgcgagtggcgctgctgctcctgctcctggtggccgccagccggcgcgcagcaggagcgcccctggccactgaactgcgctgccagtgcttgcagaccctgcagggaattcacctcaagaacatccaaagtgtgaaggtgaagtcccccggaccccactgcgcccaaaccgaagtcatagccacactcaagaatgggcagaaagcttgtctcaaccccgcatcgcccatggttaagaaaatcatcgaaaagatgctgaaaaatggcaaatccaactgaccagaaggaaggaggaagcttattggtggctgttcctgaaggagccctgccttacaggaacagaagaggaaagagagacacagctgcagaggccacctggattgcgcctaatgtgtttgagcatcacttaggagaagtcttctatttatttatttatttatttatttatttgtttgttttagaagattctatgttaatattttatgtgtaaaataaggttatgattgaatctacttgcacactctcccattatatttattgtttattttaggtcaaacccaagttagttcaatcctgattcatatttaatttgaagatagaaggtttgcagatattctctagtcatttgttaatatttcttcgtgatgacatatcacatgtcagccactgtgatagaggctgaggaatccaagaaaatggccagtaagatcaatgtgacggcagggaaatgtatgtgtgtctattttgtaactgtaaagatgaatgtcagttgttatttattgaaatgatttcacagtgtgtggtcaacatttctcatgttgaagctttaagaactaaaatgttctaaatatcccttggacattttatgtctttcttgtaagatactgccttgtttaatgttaattatgcagtgtttccctctgtgttagagcagagaggtttcgatattta

SEQ ID NO: 448 - DNA, 3984 bp, Homo sapiens
gtcctttcacgcgtgtcttcgtgttggtgcgcttttcactggtcataaagtgctgctcacggccgtgaactgctacagcgtgaaggccgccacccgggtccaggatgcttttgccgccgccaagctcctggccctggccctgatcatcctgctgggcttcgtccagatcgggaagggtgatgtgtccaatctagatcccaagttctcatttgaaggcaccaaactggatgtggggaacattgtgctggcattatacagcggcctctttgcctatggaggatggaattacttgaatttcgtcacagaggaaatgatcaacccctacagaaacctgcccctggccatcatcatctccctgcccatcgtgacgctggtgtacgtgctgaccaacctggcctacttcaccaccctgtccaccgagcagatgctgtcgtccgaggccgtggccgtggacttcgggaactatcacctgggcgtcatgtcctggatcatccccgtcttcgtgggcctgtcctgctttggctccgtcaatgggtccctgttcacatcctccaggctcttcttcgtggggtcccgggaaggccacctgccctccatcctctccatgatccacccacagctcctcacccccgtgccgtccctcgtgttcacgtgtgtgatgacgctgctctacgccttctccaaggacatcttctccgtcatcaacttcttcagcttcttcaactggctctgcgtggccctggccatcatcggcatgatctggctgcgccacagaaagcctgagcttgagcggcccatcaaggtgaacctggccctgcctgtgttcttcatcctggcctgcctcttcctgatcgccgtctccttctggaagacacccgtggagtgtggcatcggcttcaccatcatcctcagcgggctgcccgtctacttcttcggggtctggtggaaaaacaagcccaagtggctcctccagggcatcttctccacgaccgtcctgtgtcagaagctcatgcaggtggtcccccaggagacatagccaggaggccgagtggctgccggaggagcatgcgcagaggccagttaaagtagatcacctcctcgaacccactccggttccccgcaacccacagctcagctgcccatcccagtcctcgccgtccctcccaggtcgggcagtggaggctgctgtgaaaactctggtacgaatctcatccctcaactgagggccagggacccaggtgtgcctgtgctcctgcccaggagcagcttttggtctccttgggccctttttcccttccctcctttgtttacttatatatatattttttttaaacttaaattttgggtcaacttgacaccactaagatgattttttaaggagctgggggaaggcaggagccttcctttctcctgccccaagggcccagaccctgggcaaacagagctactgagacttggaacctcattgctaccacagacttgcactgaagccagacagctgcccagacacatgggcttgtgacattcgtgaaaaccaaccctgtgggcttatgtctctgccttagggtttgcagagtggaaactcagccgtagggtggcactgggagggggtgggggatctgggcaaggtgggtgattcctcccaggaggtgcttgaggccccgatggactcctgaccataatcctagccccgagacaccatcctgagccagggaacagccccagggttggggggtgccggcatctcccctagctcaccaggcctggcctctgggcagtgtggcctcttggctatttctgttccagttttggaggctgagttctggttcatgcagacaaagccctgtccttcagtcttctagaaacagagacaagaaaggcagacacaccgcggccaggcacccatgtgggcgcccaccctgggctccacacagcagtgtcccctgccccagaggtcgcagctaccctcagcctccaatgcattggcctctgtaccgcccggcagccccttctggccggtgctgggttcccactcccggcctaggcacctccccgctctccctgtcacgctcatgtcctgtcctggtcctgatgcccgttgtctaggagacagagccaagcactgctcacgtctctgccgcctgcgtttggaggcccctgggctctcacccagtccccacccgcctgcagagagggaactagggcaccccttgtttctgttgttcccgtgaatttttttcgctatgggaggcagccgaggcctggccaatgcggcccactttcctgagctgtcgctgcctccatggcagcagccaaggacccccagaacaagaagacccccccgcaggatccctcctgagctcggggggctctgccttctcaggccccgggcttcccttctccccagccagaggtggagccaagtggtccagcgtcactccagtgctcagctgtggctggaggagctggcctgtggcacagccctgagtgtcccaagccgggagccaacgaagccggacacggcttcactgaccagcggctgctcaagccgcaagctctcagcaagtgcccagtggagcctgccgcccccacctgggcaccgggaccccctcaccatccagtgggcccggagaaacctgatgaacagtttggggactcaggaccagatgtccgtctctcttgcttgaggaatgaagacctttattcacccctgccccgttgcttcccgctgcacatggacagacttcacagcgtctgctcataggacctgcatccttcctggggacgaattccactcgtccaagggacagcccacggtctggaggccgaggaccaccagcaggcaggtggactgactgtgttgggcaagacctcttccctctgggcctgttctcttggctgcaaataaggacagcagctggtgccccacctgcctggtgcattgctgtgtgaatccaggaggcagtggacatcgtaggcagccacggccccaggtccaggagaagtgctccctggaggcacggaccactgcttcccactggggccggcggggcccacgcacgacgtcagcctcttaccttcccgcctcggctaggggtcctcgggatgccgttctgttccaacctcctgttctgggaggtggacatgcctcaaggatacagggagccggcggcctctcgacggcacgcacttcctgttggctgctgcggctgtgggcgagcatgggggctgccagcgtctgttgtggaaagtagctgctagtgaaatggctggggccgctggggtccgtcttcacactgcgcaggtctcttctgggcgtctgagctggggtgggagctcctccgcagaaggttggtggggggtccagtctgtgatccttggtgctgtgtgccccactccagcctggggaccccacttcagaaggtaggggccgtgtcccgcggtgctgactgaggcctgcttccccctccccctcctgctgtgctggaattccacagggaccagggccaccgcaggggactgtctcagaagacttgatttttccgtccctttttctccacactccactgacaaacgtccccagcggtttccacttgtgggcttcaggtgttttcaagcacaacccaccacaacaagcaagtgcattttcagtcgttgtgcttttttgttttgtgctaacgtcttactaatttaaagatgctgtcggcaccatgtttatttatttccagtggtcatgctcagccttgctgctctgcgtggcgcaggtgccatgcctgctccctgtctgtgtcccagccacgcagggccatccactgtgacgtcggccgaccaggctggacaccctctgccgagtaatgacgtgtgtggctgggaccttctttattctgtgttaatggctaacctgttacactgggctgggttgggtagggtgttctggcttttttgtggggtttttatttttaaagaaacactcaatcatcctag

SEQ ID NO: 449 - DNA, 2113 bp, Homo sapiens
gtgcggttgggaacgcggagcggacggattcgattcaacggggttccggaccgcgctgcgctatggagcaggtcaatgagctgaaggagaaaggcaacaaggccctgagcgtgggtaacatcgatgatgccttacagtgctactccgaagctattaagctggatccccacaaccacgtgctgtacagcaaccgttctgctgcctatgccaagaaaggagactaccagaaggcttatgaggatggctgcaagactgtcgacctaaagcctgactggggcaagggctattcacgaaaagcagcagctctagagttcttaaaccgctttgaagaagccaagcgaacctatgaggagggcttaaaacacgaggcaaataaccctcaactgaaagagggtttacagaatatggaggccaggttggcagagagaaaattcatgaaccctttcaacatgcctaatctgtatcagaagttggagagtgatcccaggacaaggacactactcagtgatcctacctaccgggagctgatagagcagctacgaaacaagccttctgacctgggcacgaaactacaagatccccggatcatgaccactctcagcgtcctccttggggtcgatctgggcagtatggatgaggaggaagagattgcaacacctccaccaccaccccctcccaaaaaggagaccaagccagagccaatggaagaagatcttccagagaataagaagcaggcactgaaagaaaaagagctggggaacgatgcctacaagaagaaagactttgacacagccttgaagcattacgacaaagccaaggagctggaccccactaacatgacttacattaccaatcaagcagcggtatactttgaaaagggcgactacaataagtgccgggagctttgtgagaaggccattgaagtggggagagaaaaccgagaagactatcgacagattgccaaagcatatgctcgaattggcaactcctacttcaaagaagaaaagtacaaggatgccatccatttctataacaagtctctggcagagcaccgaaccccagatgtgctcaagaaatgccagcaggcagagaaaatcctgaaggagcaagagcggctggcctacataaaccccgacctggctttggaggagaagaacaaaggcaacgagtgttttcagaaaggggactatccccaggccatgaagcattatacagaagccatcaaaaggaacccgaaagatgccaaattatacagcaatcgagctgcctgctacaccaaactcctggagttccagctggcactcaaggactgtgaggaatgtatccagctggagccgaccttcatcaagggttatacacggaaagccgctgcgctggaagcgatgaaggactacaccaaagccatggatgtgtaccagaaggcgctagacctggactccagctgtaaggaggcggcagacggctaccagcgctgtatgatggcgcagtacaaccggcacgacagccccgaagatgtgaagcgacgagccatggccgaccctgaggtgcagcagatcatgagtgacccagccatgcgccttatcctggaacagatgcagaaggacccccaggcactcagcgaacacttaaagaatcctgtaatagcacagaagatccagaagctgatggatgtgggtctgattgcaattcggtgatgacttgttcatccccccttcccttcgccctcatgtggaaagaggagctgggaccgcggcgagcagcacggagcggaagggagagcaggggagagaaggcctcatctctctatatttatacataaccccggggaagacacagagactcgtacctgcgctgtttgtgccgccgctgcctctgggccctcccagcacacgcatggtctcttcaccgctgccctcgagttccatgtctctttcccctgcccctagttgctgtctcggctgctctcccatagttggttttttttttatttggggcagtgggcatgttatggggaggggagggggttcttccagcctcaggtcccagctgtctcacgttgtttattctgcgtccccttctccaataaaacaagccagttgggcgtggttataac

SEQ ID NO: 450 - DNA, 2372 bp, Homo sapiens
gcaccgcgcgagcttggctgcttctggggcctgtgtggccctgtgtgtcggaaagatggagcaagaagccgagcccgaggggcggccgcgacccctctgaccgagatcctgctgctttcgcagccaggagcaccgtccctccccggattagtgcgtacgagcgcccagtgccctggcccggagagtggaatgatccccgaggcccagggcgtcgtgcttccgcagtagtcagtccccgtgaaggaaactggggagtcttgagggacccccgactccaagcgcgaaaaccccggatggtgaggagcaggcaaatgtgcaataccaacatgtctgtacctactgatggtgctgtaaccacctcacagattccagcttcggaacaagagaccctggttagaccaaagccattgcttttgaagttattaaagtctgttggtgcacaaaaagacacttatactatgaaagaggttcttttttatcttggccagtatattatgactaaacgattatatgatgagaagcaacaacatattgtatattgttcaaatgatcttctaggagatttgtttggcgtgccaagcttctctgtgaaagagcacaggaaaatatataccatgatctacaggaacttggtagtagtcaatcagcaggaatcatcggactcaggtacatctgtgagtgagaacaggtgtcaccttgaaggtgggagtgatcaaaaggaccttgtacaagagcttcaggaagagaaaccttcatcttcacatttggtttctagaccatctacctcatctagaaggagagcaattagtgagacagaagaaaattcagatgaattatctggtgaacgacaaagaaaacgccacaaatctgatagtatttccctttcctttgatgaaagcctggctctgtgtgtaataagggagatatgttgtgaaagaagcagtagcagtgaatctacagggacgccatcgaatccggatcttgatgctggtgtaagtgaacattcaggtgattggttggatcaggattcagtttcagatcagtttagtgtagaatttgaagttgaatctctcgactcagaagattatagccttagtgaagaaggacaagaactctcagatgaagatgatgaggtatatcaagttactgtgtatcaggcaggggagagtgatacagattcatttgaagaagatcctgaaatttccttagctgactattggaaatgcacttcatgcaatgaaatgaatcccccccttccatcacattgcaacagatgttgggcccttcgtgagaattggcttcctgaagataaagggaaagataaaggggaaatctctgagaaagccaaactggaaaactcaacacaagctgaagagggctttgatgttcctgattgtaaaaaaactatagtgaatgattccagagagtcatgtgttgaggaaaatgatgataaaattacacaagcttcacaatcacaagaaagtgaagactattctcagccatcaacttctagtagcattatttatagcagccaagaagatgtgaaagagtttgaaagggaagaaacccaagacaaagaagagagtgtggaatctagtttgccccttaatgccattgaaccttgtgtgatttgtcaaggtcgacctaaaaatggttgcattgtccatggcaaaacaggacatcttatggcctgctttacatgtgcaaagaagctaaagaaaaggaataagccctgcccagtatgtagacaaccaattcaaatgattgtgctaacttatttcccctagttgacctgtctataagagaattatatatttctaactatataaccctaggaatttagacaacctgaaatttattcacatatatcaaagtgagaaaatgcctcaattcacatagatttcttctctttagtataattgacctactttggtagtggaatagtgaatacttactataatttgacttgaatatgtagctcatcctttacaccaactcctaattttaaataatttctactctgtcttaaatgagaagtacttggttttttttttcttaaatatgtatatgacatttaaatgtaacttattattttttttgagaccgagtcttgctctgttacccaggctggagtgcagtgggtgatcttggctcactgcaagctctgccctccccgggttcgcaccattctcctgcctcagcctcccaattagcttggcctacagtcatctgccaccacacctggctaattttttgtacttttagtagagacagggtttcaccgtgttagccaggatggtctcgatctcctgacctcgtgatccgcccacctcggcctcccaaagtgctgggattacaggcatgagccaccg

SEQ ID NO: 451 - DNA, 1618 bp, Homo sapiens
atgtcccggccgcagcttcgacgctggcgcctcgtctctagcccgccgagcggcgtcccgggtctagcgctgctggcgctgctggcgctgctggcgctgcggctcgcggccgggaccgactgcccatgcccggagcctgagctctgccgcccgattcgccaccatccagatttcgaggtctttgtgtttgatgttggacagaaaacttggaaatcttatgattggtcacagattacaactgtggcaacatttggaaaatatgactcagaacttatgtgctacgctcattcaaaaggagccagagtagtacttaaaggagatgtatccttaaaggatatcattgatcctgctttcagagcatcctggatagctcaaaaacttaatttggccaaaacacaatatatggatggaattaatatagatatagagcaagaagttaattgtttatcacctgaatatgatgcattaactgctttagtcaaagaaactacagactctttccatcgtgaaattgagggatcacaggtaacctttgatgtagcttggtctccaaagaacatagacagaagatgctataattatactggaatcgcagatgcttgtgacttcctctttgtgatgtcttatgatgaacaaagtcagatctggtcagaatgtattgcagcagccaatgctccctataatcagacattaactggatataatgactacatcaagatgagcattaatcctaagaaacttgtaatgggtgttccttggtatggttatgattatacctgcctgaatctgtctgaggatcatgtttgtaccattgcaaaagtccctttccggggggctccttgtagtgacgctgcaggacgtcaggtgccctacaaaacgatcatgaagcaaataaatagttctatttctggaaacctatgggataaagatcagcgggctccttattataactataaagatcctgctggccactttcatcaagtatggtatgataaccctcagagtatttctttaaaggcaacatatatacaaaactatcgcttacggggcattggcatgtggaatgcaaactgtcttgactactctggagatgctgtagccaaacagcaaactgaagaaatgtgggaagtcttaaagccaaagctgttacagagatgaacatcttttgtcaaaccattaagagttagaaagatgatctgtatcaacagatctagtttcttgcatttttattatgttgctatatacttttgttatccgtatactaaaaaaaaagaataaataaatgttttgattgtttgaatttgaaaaatacacacgaatgtcctcagtatccaggaacataaaggcaagaagcaagtcaacttacctattaaatattcctctattagatgtttcaacactataatttaattgggaaaaattgctttcagaattttattatgccatatttcccttcattatagtaaaatatatgctcacgaatcaatgctgatttttaaaatatgtataatctgaagtggaaattgtttgcttagagtttttaaaaacctagtctttgaaaagcagtttgtgctatacttttcccccaaccctccaataaatcttaaatttaaaacct

SEQ ID NO: 452 - DNA, 1717 bp, Homo sapiens
cgcctaccgtctccttcaaggcactttcttagacacccgggcaccaggcagatgcaccccccaacacacccaccccaagcaagtcacaaatcagcctgctccaactgtcttatggggagggtgtgagagaggtgcccaaaggcccctaaaaggtgagcctctcctctctccccacaggggtgaatgtgatgctgaggaagattgctgtggctgcagcgtccaagccagcagtggagatcaaacaggagggagacactttctacatcaaaacctccaccaccgtgcgcaccacagagattaacttcaaggttggggaggagtttgaggagcagactgtggatgggaggccctgtaaggtgagtgccagaaggggctccagggtcatggcgtcattgccctgcctctcaacctgccattttccaggctagcagttaactcctagcttctctctgtcccagtagggaaaatccctaggtagtggtgggggctagaaaggggctctctcccttatccctctcactgcattgcccctgctatgggcccagctcacttggccacctgtctcttgcagagcctggtgaaatgggagagtgagaataaaatggtctgtgagcagaagctcctgaagggagagggccccaagacctcgtggaccagagaactgaccaacgatggggaactgatcctggtaagtcctgcctcctccccactaatagcaaacccagtgctaccttccaagattctctgggagaccccagggtgcaggagactcaagaacaaccatggctggactccgcaccctgctgatgggactgcttgaacagaactaaggtgtccctatcccatacagtgccctgtgtgaattagaaatggtgttccttttatgcaagcaaagggcatgtactgagggatcccagcagttcttcagggagatcttcctggcttgaggaggaggacgggccccagggctctattgctatcctccctccattgatgcctgggcattctgggaccagctcctgcctgttggtcttgagccaagaagcaggtttggacctggaggccaagcagagtacctccattcaaccctcctctccaaagccacaggaccccaggggcctctcaggctaacaactacttctgtccttccagaccatgacggcggatgacgttgtgtgcaccagggtctacgtccgagagtgagtggccacaggtagaaccgcggccgaagcccaccactggccatgctcaccgccctgcttcactgccccctccgtcccaccccctccttctaggatagcgctccccttaccccagtcacttctgggggtcactgggatgcctcttgcagggtcttgctttctttgacctcttctctcctcccctacaccaacaaagaggaatggctgcaagagcccagatcacccattccgggttcactccccgcctccccaagtcagcagtcctagccccaaaccagcccagagcagggtctctctaaaggggacttgagggcctgagcaggaaagactggccctctagcttctaccctttgtccctgtagcctatacagtttagaatatttatttgttaattttattaaaatgctttaaaaaaataaaacctgtctctggctcattgggcaggtagataagtcacctgagttcaaccttgcctctgaaatgtagtatgggaaagacttgtgtttctgcagcat

SEQ ID NO: 453 - DNA, 330 bp, Homo sapiens
tgtggataaatatattagcaaataaatatatttcttaacatagtgcctgattcaagcgtctgtctggttcagatataaatacccatgtgggtacctaggtgctagtctccccactaactgagggaaaaaggttcccaggtggggtcctctgcccactttgccaccacattcacattccaaatgggataatgcctgaggggccaagagtggtcaggctgccctggggtgaatgtcaccctgatgaggcccatcagctcttgtccactcagtgaggccagacttgtgctctaatccactctcctgtgggtccctggcctgtatggcttatac

SEQ ID NO: 454 - DNA, 537 bp, Homo sapiens
  misc_feature (1)...(537): n=a,t,g or c
tcttttaaaaaataaatatttataaacttaaggaagattcaaagaatcagggtatcttttcctccaaaaacacaaatgtcccgtgtaagtcaaaccaaggtgcgaccaccaacccatgaatgaagtcccctccccctgcagctacagggttgaggggcaggtgggcaggggagctgctctctctcctgccttcagtcccccttggtgatgaggtcctcaatgtaggcgtccagctcatcatctgtgttgatgtctatgtcctcctgcaccttttgcaggagtgccacgatgttggtcctcagcttctgcagcttctcctccgtctcggcgganttccctctcggaggtgcgcaggctttcctcggaggccttggccgggagtcagcacggctctggtaggaattgcacaggttttggagccctacttcatattgcttgaagtactccttcagaggaaaagatattagctcatctgaattcatagcactcagctgcttcttggagatggggaaacttggaaggcaggaagtanccgta

SEQ ID NO: 455 - DNA, 465 bp, Homo sapiens
caacagccaaataaaaactttattactttttaggcttgacatctttaacagtagaacaagatcactcatgataaatctggaagatgcagatggaagacagtgcttgaagcccaaacaaatgatttactacaagtaattaaaagcagaatatgagaaaagcagcagtgtaaatgacgtaaacattaaaaaatatattagtttgtatatttcccccaggaagtctcacaggaagcacaggacacctgtgcggctgtttgggcatcctgggtacttcttgccctcaggtgaactcccatctctttagttaggaccagaatccacctggcttgtaggagaggaactacatgggagaagctgcattgaggcttttattattaatacctatgactcaaggaataccagccttgggggtgctttggggcctggggagggaagtgactggctctcctggctacactggagact

SEQ ID NO: 456 - DNA, 295 bp, Homo sapiens
caagtttcttcagagtttttaattattattattattttaataacaacctgaatcccagaacttccagatactgtccacactccctcccctgggcagaggagaggaggcacctcaagggaacaagatgggggtggggtgtctgccggggagcctccgactcccccaagccgtctactgctggggggtcccaggagggagggtgggggttggttccctcccagaggggctccctctgacgccccgtcctgaagccctccctcctccatcaaggctggggatgatgaggagatggggc

SEQ ID NO: 457 - DNA, 488 bp, Homo sapiens
  misc_feature (1)...(488): n=a,t,g or c
gcgaccgcagtngcaactccagctggggccgtgcggacgaagattctgccagcagttcggtccgactgcgacggcggcggcgacagtcnagggtgcagcgcgggccctnggggtcttgcaaggctgagctgacgccgcagaggtcgtgtcacgtcccacgaccttgacgccgtcggggacagccggaacanagcccggtgaaggcgggaggctcgaagatcccctcgggaagggcggcccgagagatacgcaggtgcaggtggccgccggatcccagccgcacttctggcgtgagtatccggactgcaggggccgggacgaggtcggtgttcgaatcttcccagctctggttggcccgcaacctgggttaagcaggtcctcgtagcgtttccgcaactctccggaatctggagtcttccggtgtgcaactctgaatggtcccgggaaacttgcgcggctcgcatcggntaaagacagggtgcccccat

SEQ ID NO: 458 - DNA, 448 bp, Homo sapiens
tcgtttctatgaaattactcgtatttatttagtttttctccttcaacaaaaatggaatcaactataaaaactcttgcatcctactttttttcacttactaaatcttagagagttttctgtcaaaacatattgccctagctcatttaaaaaaataacatatatcttatcagtttcctgtgaatagccatttagtctgtttcccatttttattaaaacaatcagtgcccatgtttacttttttttttttgagagggatttttgctcttgttgcccaggctggagtgcagtggcacgaatctcagctcaccgcaacctccacctcccaggttcaagtgattctcctgtctcagcctcctgagtagctgggattacaggcatgtaccaccatacccggctagttttggtatttttagtagagatggggtttctccattttggtcaggctggg

SEQ ID NO: 459 - DNA, 466 bp, Homo sapiens
atcaaagaaacatagagttcgggcaatatacttcatcctacccatcccacccaaatcttactctactcatctcattctcattaattttgggaaatcatcagaagatgtgttcgttgagtaagagattaaaagaaataagctttttgacccctgccaacaccccatgcccagggtggtcaccctccaatacaataacatgccaggaagagtaagttgccctttctgatgccgtaatctgccatcatcttcccatcttccagtctcctttccattgcaagtcacaatctgggtctcagggattatacccgtcttagtctcgatcattgctttcacttgtgccactgagctggaccttcgcacctgggaggaggtgcctctttgcctcatcacctgactccacaagaaacaagggcagctcctcatcactggggcttcaccactttcaggggtaaggtgggatggtctt

SEQ ID NO: 460 - DNA, 340 bp, Homo sapiens
  misc_feature (1)...(340): n=a,t,g or c
gtgaactcctggcctcaagggatcctctggcatgccttgnctcccaaaggcntaggatcacaggcaaaagcaccgtgtgtttatttttcccattcccttcctttatctgcaatgcttttttctttaaggcagcctaatttacaagcttggccttgaattaaaagagaacccagaacccgctcttggagtttacgttctcaaaccaacatcagagcaactgtctatccccatataaataaagttatctacccctgctcctaactgggtacaagttatgactacaactcagtgattttttaaattagtgtgcctatttggtgaaatctgtgaacttaatcaa

SEQ ID NO: 461 - DNA, 470 bp, Homo sapiens
  misc_feature (1)...(470): n=a,t,g or c
aggattcaaacattctaggctttaattctttacctgatgtactcatagaagtaagtcggcctcgttccaggggaggagcccatttgacatatatttcaaactgggctgttgcaactatcccctgggctgctccctgaactgctcgacatacaacgacccaagctactccaattccagctgctggtgggatgagcaggcttaacacagagctgaggcataatgcaaagccaatcattttctttgtagaatatattccagagaagtatccaacaggaacttggatgatgatgacaccataggaggtggaactcaagatgattccctgggatatctgggctccaattatacatagggttcttttatattatccaggaagcttctttgtggaggtgttnggcaaaccatgtggatctgtggctattcaccatgactaccattgtgaggttcaggcacgcacgctgtgctggtta

SEQ ID NO: 462 - DNA, 320 bp, Homo sapiens
cacagtggcagattttctttaatagatatatttcaaacagatacaacaaattaaaaaatctaattcacggcaggtaaacatgggtgctcaaaaagttccacatagacatttacacttgggccatcagtatttccctcacattcccttttgttaagtcccatcttcgcagtggcagtacaggagaaatctccaccgtcaccgcacaatccaccaggcgcattaccacctgaagtgaaggtctcatctcgaaggtgcgctcagccataaaaagaaaacatattacagaaaggaaaaataagtgtgctcttcccacccgcaaa

SEQ ID NO: 463 - DNA, 418 bp, Homo sapiens
  misc_feature (1)...(418): n=a,t,g or c
aaaatcaaaacacacgcaaaaatatattactactcatttgagggtaccctgttatgaaggtataatttatatataataaaattcattattttttagttacagagttctatgagttttggcaaatgcattcaatgccatcactactacaatcaagatatagaacagctccatcacttcaaacaattttcttgtgtcttttttcatcaattcttcctccaactcacagcacagatctgtttgctgatcctgtagtttttaaaatgccatatggattatatacagtatgtagcattttaagtctgacttcctctaattaagcataatgcatttgatgtaactccaagttgttgcangtattggggtgctcatttctttttattactgagtagtatttccactgtatgaatacaccatagtn

SEQ ID NO: 464 - DNA, 434 bp, Homo sapiens
  misc_feature (1)...(434): n=a,t,g or c
agtctcactctgttgctcaggctggagtgcagtggtgtaaggacggcccaatgcagcttcaacctcctgagctcaagcaatcctcttgccttagcctcctgagcagctgagactacaggcatgcgccactgtgcccaggtattttttaaaatttttgtagagatagagtctcattctgttgcctaggctgggtctcaaactcctagactcaagccatcctcacacctcagcctcccaaagtgctgggattacaggtgtgagcctccacgtctggcctggaaatttttaaaaaacatattttcaggatcaagttagaaattataatnggaattgtaaaaatactaaaaattggggtgataatgacaacatcacattaccaaaatttgtgggggttcagtaaaagctctatttcaatctaaatttatagtgtaagt

SEQ ID NO: 465 - DNA, 417 bp, Homo sapiens
ttccagttaatttagtcctttatttttttcattctccatagaatattggttttgtaacaacgaatacaatccaatatataacattaaaacaatccgatacataccattctgctttatgaaagatcagcaaaaatacataaacaaggatataactagtacatttataaaatacatcataacaatgaaaccaaaggatcccacacaataatcttcacatttgacatgctggttacagctgaggagagccagtgtctttggcaagtgattcatatacataagcgatgacactgactaatcctaacacttctgaaatgttcattctttaccagttaaacctaaaataaatcagcaagagtactgaaatataacaagaatgaaatccaaaatttgtcgaaaggggcaatgtttaatactagg

SEQ ID NO: 466 - DNA, 374 bp, Homo sapiens
gaatacaatgatgtatttctttattttcacatacactctagctaaaagagcaagagtacacatcaacaaaaatggaaacaaggctttggctgaaaaaaacatgcatttgacaaatcatgttaatagctagacaagaagaaagttagctttgtaaacttctacttcatttgattcagagaaacagagcatgagttttcttaaaagtaacaagaaaaggaacaaaaaaaatgaggtttgaaatcttttaccatggcaaaacattaacatctttctcaaaaacatagagaaatctggaaaaatcaagaagataaaattctggaccagttagttgacattctttcaagcatacttgtaaaatgtttccttaaagtgtt

SEQ ID NO: 467 - DNA, 437 bp, Homo sapiens
gacacactatttttcgttagtttattacaaaactacagatacaatacacaaaattctaattccgaaatccttctacattttttttttctgagactaaatgccctcaaagcccgtctgcttggcctgtattacaacctgactcctcggctcctggatgcacaggtcagatgttccaacaaccctgaccatggccagtgctatggagtcactccaaaggtggttgagccctctgtgaaaatttaaatggctgctaagtcattctaaataaatacgtgaacggattgtttctgcccctaagatgaaatcccacagatcttatgctcaagctcaggtcttcctactgccgccttcgacatctagaaagtatggtgggatcttcactggatttgttaaccctgggagtgccccttgtgatccagatgagtcaaaacaaacgg

SEQ ID NO: 468 - DNA, 470 bp, Homo sapiens
  misc_feature (1)...(470): n=a,t,g or c
ttacttatcggaggttttattatttttatttatttttgagactgagtcttgctctgtcatcaggctggagtgcagtggctcactgcaacctccgcctcccaggttcaagcaattctcctgcctcagcctccctagtagctgggattacaggtgtccaccaccatgcccaattaatttttgtatttttggtacagacagggtttcaccatgttggccaggatggtctcgatctcgttgaccttgtgatccgcctgcctcggcctcccaaagtgctgggattacaggcgtgcaaccngcccctggactacttatggaggttttaaaaaatcttttaagtccaggcctgacgtttagagaaggttacaaaggcggccaggatctgagtatttccaaaaagctctggaggcagcattgaggtttccttccagttgaatcactgactttaggtcgactggggtactttgggtttt

SEQ ID NO: 469 - DNA, 443 bp, Homo sapiens
ccccgtctcaaaaaatattaataaaaaaatatggctgctttgtagagaatggttgggagggagaatgtgtgggtgtagggaggtctagtgggaggcttttatggggggtgtggggggggtggcctttagcagggcagatggaggaagtgccttgtgccataagacacaggaaggggatgagggaggatgtttcccggccatgatgtactggggccagctcctaccggcttgaaagagccaattctacacatctcttcccaacttggcatttagcgtcttcatgttggtagcctgaaattggctaatggtgggaggctctgcaccacggaaattggcaaacactacgaatcagggcttcccccccatcacacagccagttgctaaatgcttacaagcacatcactggctgtctgctttccagcttgtggtggtttccggtagta

SEQ ID NO: 470 - DNA, 427 bp, Homo sapiens
gacatcctttgtatgtttactataataacagcaaaatttttccaaaccagagccaatttccttggctctaggtacaccccttccaagcaatgcaaaggacatctccaatcatgacatttaagacaattctttatttctctgacagtgacttcttgaagtgcacatataataaataaatagaaaatatatctttgttcatggtgatgcctacaagaaatgtttacatacaaacactctgtacatctaactcccgaaaaaggaccagctatttcggcaacagaaaaaagacaagcatttcagaggagcgttgcttttccttaaagacctaactcacttaagtctttaccaaacagaaataacaagggaggacaattttctaagcaataagaaaatttgtggctaccaaggaaaatgcctagatattggg

SEQ ID NO: 471 - DNA, 436 bp, Homo sapiens
  misc_feature (1)...(436): n=a,t,g or c
tttgctgtaatacacaaaagttttatttttgactttcttcttttctgaaggcaaaataaaatagaactgaacatcagtgaattttgtacaacaaaaacagcttttaatatggaatagtccatgaacattttaaaatctcggaatggcttccctttttcaaagtcatgctttcttgcggtccacaaggagttggcacagaggagatggtggcagcggcgggtgaggtgagtggaggacagggcttctctcagatccgtgttagctggtgccacagactggatgggaggatgctctccacttttctccatgacaaagtttaagggggcaaacaaagtgctgaggaaagcntttgcgaagacccccataagttccgggaactgatgtgtcaggagggccagcatgctgttgaaggaacataatccagcagtaaagagaa

SEQ ID NO: 472 - DNA, 340 bp, Homo sapiens
  misc_feature (1)...(340): n=a,t,g or c
gccttctgagagcaaagtttaatcctgacccagaattataataatttctgaaagttctattaatttcagcacactgtgtaggaattactcaggcttttcccatcctatagctcctaaaaaaccaaagtggctaaccatatctggcataacagaggaagtaaggtgcanttccngantnttcaaccatcacagaaaaagcacacttaatttgcatctcaagtcgtctggagtaaagtctatgttgctggcaacagttgtgttatcctgacttctcttccccaggtccctggtggtctgtaacagagatgtgtttgtgaaaatgctgtcacttggctttctc

SEQ ID NO: 473 - DNA, 505 bp, Homo sapiens
  misc_feature (1)...(505): n=a,t,g or c
tttttttccctgcacacacactttattttgtcctctctgagcccttctcacttccccctcaggacggccaccccttggcatcgggtgcaganccccatccagccgcggtgagggtggctgtcatccggcgggtcctcaccctggtccctaggcttgcgcaagctgatgggtctcatagtcctctgggatggtgtcattgcagcggtaacagggttggcccagatgatgttctcctgggagaagcagaagacccccaggcggccaccccgcatggttgtgtccaagaccacgttgctgtcggccaccagctcagggccctcatagaatcgcaccctgatgtagcccacttgggnccgggtgctgcaggaaccaacgataggacttcttgtccttccaacccacgtttcgcgggtccttccacagcagccgaacctgggaatctgtgtctcctgtatgcaaagaagcgtttcgaagctgttnccggggcctgtggaanaattnaaag

SEQ ID NO: 474 - DNA, 302 bp, Homo sapiens
  misc_feature (1)...(302): n=a,t,g or c
ccattaaggtgaaatcacctatgttttattataaaaaacatgtgacacttataataaacccagtaaggagcacatacaatttgccctgggttcccattttctgagcgatctgtgtttgcttggggtggaggcaccgggaggntcggccacgtggcttcataaagctcagctgcggttctccgtggccacagtgactctgctccgggtacccagtccccgactccttggcctcccaggggccatcccgggggtctcggaaggcacagctcggttagctttgacttcttggtgtggctgaaact

SEQ ID NO: 475 - DNA, 417 bp, Homo sapiens
  misc_feature (1)...(417): n=a,t,g or c
ttagtagagacgaggtcttgctatgtggccctggntggtctcgaactccagagcccaaatgatccacccaccttggcctcccaaagtgctgggattacagaaatgagccaccacacctggcctgattgtttttaaatggcagcaagaacagggttggacagcaagggcaaatcacacagtatgtggcatattcagaattggttgtgagtttccagtagaaagcactgagaatatccatagggcaaaatggaatactaataatcctcatttgcctttgcctttgtactgggaaaccagaccttactttaagcccaccaaaggcaaggtttggggcctgccacagcgggatttcaaaaagacaaagcaatgcaagccacgtgttcaaaatgcccttaagtgggctttttcagggtnttt

SEQ ID NO: 476 - DNA, 375 bp, Homo sapiens
  misc_feature (1)...(375): n=a,t,g or c
ttnacatgaaagagaaactttattgaagtggcaaagagtgaaagtgagggactggcctggagtgggagttgccacactgccccaacagtgattccctttcaaagagctgtgcttcctaaacattctggggggttttgccagagtcttccccttgctcatcctcatttccaggacactgtcattttagtggtctgagtcaagtcccgtatacattcaagaacagggcataggcgtgggaaggtctgggaaagttggggtctttttcccttacatttggggtgactttgattgggnccccctcttcatgattccctctgttgccctcaagttttcccctttggggtaaaattggggggggaaatttttctnccatgt

SEQ ID NO: 477 - DNA, 272 bp, Homo sapiens
  misc_feature (1)...(272): n=a,t,g or c
ttnttttttttctctcatcttgtcttctcgctttatttcattaagttgatcttcaatctctgatatcctttcttccacttgattgatacagctattgatacttttgtttgcttcacgaagttctcgtgctgtgtttttcagctccatcgggtcatttatattcttctctaaactggttattctagttagcaattcatctaaccttttttcaaggttcttagcttccttgcattagggttagaacatgctccctttagtttgggaggagtttg

SEQ ID NO: 478 - DNA, 244 bp, Homo sapiens
  misc_feature (1)...(244): n=a,t,g or c
atgatcnagacttgctttaatctgcacactgcgggggtgggggtgggcatgctcctcagcagtgcattctgggacacgggcgggcgggggctggcacgggaggacgagagcacctgcagggcagcgctggncgngcgnncgggcgggcgggcgatgtgtcagctgcagttcttgggcaggcggtagacgccgtccgcagttagacgagctgctggtcccgcaccttcttctgcaggtagccctg

SEQ ID NO: 479 - DNA, 429 bp, Homo sapiens
  misc_feature (1)...(429): n=a,t,g or c
aganaattnnttttattcagcctgatatagatcatttatgaaaaactaacagcaaacatcatcctcaatggtaaaaggctgaaggatttttctctaaggttaggaacaaggcaaatgcctgctcttgccactctattcagcatagtgctgggagttctagacagagcagttaggcaaggaaaaggaaatctaagggcatccaaattgggaaagggagggaaggtaaaattatctctgtttggccaatggatatggattttatatggtatggaataggaaaacccttaaaggattccncccaggggccnggggncggggtgggcctcacggcctttttaattccccagcactttggggggaggggcccagggtgggggnggggtttgctttgagggnccaggggggtttccaggacttggccgggggggg

SEQ ID NO: 480 - DNA, 284 bp, Homo sapiens
tttttttttttttggaaaaagaaatttttttttaattagaaaccaagtttacatacggttaaatggttactaaaagctcagttgtaaccactcctaacaccactagcagaacctcaagggagccaagagctcttcccttttcccctgttaatttccagtataatgtagcagcacaattatttcatgtcacatttaagaagaacaagaaccaatttatataaaggtacaattgtatatccttaaacattccacataaacacactgtcaaaactcactggatatgc

SEQ ID NO: 481 - DNA, 371 bp, Homo sapiens
  misc_feature (1)...(371): n=a,t,g or c
ttttttttttttaaagtttaaacaccttttatttgaagaaatattgcttctagnactttcctgaagccagaattgttctataaaagtatcatggaatattatacatgattaaaaaacagagtatgcttcctaataacttgaaatctttttacaaagcacattattcatgatcataaatatgtttgttctgtcatcccaccgatgatacacacatcaggcaagcagctaatttgaacatatgtacagagtctatgataaagatttaaagttaccaaaaagattcaggctataacatattaaattttctttaaaagagtttaccntaaacacttaaagganaacatagtttatctaggcacttggagttatct

SEQ ID NO: 482 - DNA, 373 bp, Homo sapiens
  misc_feature (1)...(373): n=a,t,g or c
ttttttttttttaaggaataaggtgaatttttattaagtgaaaaaaatcaataacaatataggaatgatcacatctatacaaatacattgctacatttctacatataaaatgtataggaaaaagtctgaaagaatgcacaccaaattattctgtttttaggaaaagcagtaggattggtcagggcatggaatgtcggctaagtgaagtgagatttaaaatttttattctacatgattttctagtgttgggaatttttgacagtgagcatacatgcacttattacttgcataattctgaaaactattttaaaaacaacaganaatatatgaaagtctattgggtgtatacagcattaatagtagtgaaagttta

SEQ ID NO: 483 - DNA, 316 bp, Homo sapiens
  misc_feature (1)...(316): n=a,t,g or c
tgaaaggggtttatttctggtgcacacaattgcttcattgtgaatatacatgtgattctctgtacacaggaaatggaattatgttcaaaataatagacacagcaaacaagtttctttgaagttactaaaaattaatgactacataaaataaacattctaaaactaagtaagtattattaatttgaatagttagtaggtgtaagggaaaaggcatcacactacaataaacaaacaaaaaccaacatggcattcctcgcattagggtaaaggcaccttcnaaatatttttctcttttatacttttttttttaattgtg

SEQ ID NO: 484 - DNA, 364 bp, Homo sapiens
aaggctgctgttaaataactttaatggttgatgtgggagtcacaagggagttatgtttgctccaagggttcttcagtgccatcctcaaagctggttagtgcagggaggtagggcagagttggttccagttttcttccaggaagggtttagggaggtcccagcgagccccaggaatgagtccctcggtaccatggcaaccacaatttaagaggggcttctgccaacccctgcagcctaccccagggtccagcagaggaacaggaggccagactggcaaacttgctatagacagcgccgtatccagagcccaactgcgcatgggtcattttctcttctggggcagatcctatgccagcacctttct

SEQ ID NO: 485 - DNA, 328 bp, Homo sapiens
  misc_feature (1)...(326): n=a,t,g or c
tgagccaaaatatatatacttaattttagttatgccagaagtaagtataatttctcagtccaaggatgttaggaagcaacttacagagcatgcttcaaataganttctcttggcctttgaaggtaactattttcaaacttaatagtagagtcaagcaagantggacaattagagtttncaaanttgaaaantattatgtattttatataatcattacctatggtttacagattttatttttatgatacatatctctaaggtaggtgggtacactgaggacataggcaantatgccaataaatacttatttaagctggaagtganctaa

SEQ ID NO: 486 - DNA, 534 bp, Homo sapiens
caggactcgacgtcggacctgatcccggccccacctctgagcaaggtccctctgcagcagaacttccaggacaaccaattccaggggaagtggtatgtggtaggcctggcagggaatgcaattctcagagaagacaaagacccgcaaaagatgtatgccaccatctatgagctgaaagaagacaagagctacaatgtcacctccgtcctgtttaggaaaaagaagtgtgactactggatcaggacttttgttccaggttgccagcccggcgagttcacgctgggcaacattaagagttaccctggattaacgagttacctcgtccgagtggtgagcaccaactacaaccagcatgctatggtgttcttcaagaaagtttctcaaaacagggagtacttcaagatcacgctctacgggagaaccaaggagctgacttcggaactaaaggagaacttcatccgcttctccaaatctctgggcctccctgaaaaccacatcgtcttccccgtccccatcgatcaatgcatcgacggc

SEQ ID NO: 487 - DNA, 3118 bp, Homo sapiens
ggggggggggggggggggagaggcttccctggctggtgcctgagcccggcgtccctcgccccccgccctccccgcatccctctcctccctcgcgcctggccctgtggctcttcctccctccctccttccccccccccccacccctcgcccgctgcctccctcggcccagccagctgtgccggcgtttgttggctgccctgcgcccggccctccagccagccttctgccggccccgccgcgatggaggtgccccagccggagcccgcgccaggctcggctctcagtccagcaggcgtgtgcggtggcgcccagcgtccgggccacctcccgggcctcctgctgggatctcatggcctcctggggtccccggtgcgggcggccgcttcctcgccggtcaccaccctcacccagaccatgcacgacctcgccgggctcggcagccgcagccgcctgacgcacctatccctgtctcgacgggcatccgaatcctccctgtcgtctgaatcctccgaatcttctgatgcaggtctctgcatggattcccccagccctatggacccccacatggcggagcagacgtttgaacaggccatccaggcagccagccggatcattcgaaacgagcagtttgccatcagacgcttccagtctatgccggtgaggctgctgggccacagccccgtgcttcggaacatcaccaactcccaggcgcccgacggccggaggaagagcgaggcgggcagtggagctgccagcagctctggggaagacaaggagaatgatggatttgtcttcaagatgccatggaagcccacacatcccagctccacccatgctctggcagagtgggccagccgcagggaagcctttgcccagagacccagctcggcccccgacctgatgtgtctcagtcctgaccggaagatggaagtggaggagctcagccccctggccctaggtcgcttctctctgacccctgcagagggggatactgaggaagatgatggatttgtggacatcctagagagtgacttaaaggatgatgatgcagttcccccaggcatggagagtctcattagtgccccactggtcaagaccttggaaaaggaagaggaaaaggacctcgtcatgtacagcaagtgccagcggctcttccgctctccgtccatgccctgcagcgtgatccggcccatcctcaagaggctggagcggccccaggacagggacacgcccgtgcagaataagcggaggcggagcgtgacccctcctgaggagcagcaggaggctgaggaacctaaagcccgcgtcctccgctcaaaatcactgtgtcacgatgagatcgagaacctcctggacagtgaccaccgagagctgattggagattactctaaggccttcctcctacagacagtagacggaaagcaccaagacctcaagtacatctcaccagaaacgatggtggccctattgacgggcaagttcagcaacatcgtggataagtttgtgattgtagactgcagatacccctatgaatatgaaggcgggcacatcaagactgcggtgaacttgcccctggaacgcgacgccgagagcttcctactgaagagccccatcgcgccctgtagcctggacaagagagtcatcctcattttccactgtgaattctcatctgagcgtgggccccgcatgtgccgtttcatcagggaacgagaccgtgctgtcaacgactaccccagcctctactaccctgagatgtatatcctgaaaggcggctacaaggagttcttccctcagcacccgaacttctgtgaaccccaggactaccggcccatgaaccacgaggccttcaaggatgagctaaagaccttccgcctcaagactcgcagctgggctggggagcggagccggcgggagctctgtgaccggctgcaggaccagtgaggggcctgcgccagtcctgctacctcccttgcctttcgaggcctgaagccagctgccctatgggcctgccgggctgagggcctgctggaggcctcaggtgctgtccatgggaaagatggtgtggtgtcctgcctgtctgccccagcccagattcccctgtgtcatcccatcattttccatatcctggtgccccccacccctggaagagcccagtctgttgagttagttaagttgggttaataccagcttaaaggcagtattttgtgtcctccaggagcttcttgtttccttgttagggttaacccttcatcttcctgtgtcctgaaacgctcctttgtgtgtgtgtcagctgaggctggggagagccgtggtccctgaggatgggtcagagctaaactccttcctggcctgagagtcagctctctgccctgtgtacttcccgggccagggctgcccctaatctctgtaggaaccgtggtatgtctgccatgttgcccctttctcttttcccctttcctgtcccaccatacgagcacctccagcctgaacagaagctcttactctttcctatttcagtgttacctgtgtgcttggtctgtttgactttacgcccatctcaggacacttccgtagactgtttaggttcccctgtcaaatatcagttacccactcggtcccagttttgttgccccagaaagggatgttattatccttgggggctcccagggcaagggttaaggcctgaatcatgagcctgctggaagcccagcccctactgctgtgaaccctggggcctgactgctcagaacttgctgctgtcttgttgcggatggatggaaggttggatggatgggtggatggccgtggatggccgtggatgcgcagtgccttgcatacccaaaccaggtgggagcgttttgttgagcatgacacctgcagcaggaatatatgtgtgcctatttgtgtggacaaaaatatttacacttagggtttggagctattcaagaggaaatgtcacagaagcagctaaaccaaggactgagcaccctctggattctgaatctcaagatgggggcagggctgtgcttgaaggccctgctgagtcatctgttagggccttggttcaataaagcactgagcaagttgagaaaaaaaaaaaaaaaaaaaaaaaaaaaaa

SEQ ID NO: 488 - DNA, 332 bp, Homo sapiens
  misc_feature (1)...(332): n=a,t,g or c
atttggtaagattttattaagactctaagttcaaacacccttcttgggaaaagctctacaggataaccacacatgctcaactacggggccagctgctgcagctgtgggaccccatcctgtggaagaggagagaggcactaaaaagatgaggtagccaggcctgtgcccacactacgagacctgcatcaccatggtgtgaggagcagcaacgtgggtcaactnggggctgggacgagatggaagagtaaaaggcctttcttcataggcctgcctattttatgaccaccagggtagacttttgtaattaaattaaggtccacatgacttttaga

SEQ ID NO: 489 - DNA, 215 bp, Homo sapiens
  misc_feature (1)...(215): n=a,t,g or c
ttgttttccttcctgaggtgaaaaatcaagctgaatgacaattagcactaatctggcactttataaattgtgatgtagcctcgctagtcaagctgtgaatgtatattgtttgcacttaanccttaactgtattaacgttcagcttactaaactgactgcctcaagtccaggcaagttacaatgccttgttgtgcctcaataaaaaagttacatgc

SEQ ID NO: 490 - DNA, 406 bp, Homo sapiens
  misc_feature (1)...(406): n=a,t,g or c
ttttttttttggagaaccaactcatctttattaaatgcatcgtgtgtgtgtgtgtgtgtgtgtgtgtgtgtgtgtgtgtatagcacatacttcaggcctgcggcaccaccccatagagatggtgaggaagtaacttctgcttctcattgaaactgtagatccatcggggacgaacgaatgccagggaggggttgnacatcagggtctcctcaaagntgggatcccattcctgtgctgagatcacaaactgaccccggtcactcatatagtcctcgagctccccattgaaggntgtaaagtatcggatgaatttccgcgcttcggcccccaggggaactccccccttaaagaaagaagtagcttggcccctgggaaaggaaatcttggggagcttcaagggacttgg

SEQ ID NO: 491 - DNA, 369 bp, Homo sapiens
  misc_feature (1)...(369): n=a,t,g or c
catttctctgaggaagccgagaaactttaattaggtgacggggttccgagcacttaagcagatggggtgcggtgaaggcccagggaggaggagggcagggaggtgcacgtcctctgtgccccacacactttcaaccactgcaacaaacaagcacccaagagaggctgtncggcagagccctgcacccacaggcctttgacagcacagtgaggggcctccgcacgtggcctcgggacgntcactcgacgcacacccggtgcatcacactggcacctaaagacaggccgtgcagctaaaaggagcacgtttggncaaggagagcaatcagctgtcccgcgtttctaaaggcagggaccgaggctttgggag

SEQ ID NO: 492 - DNA, 504 bp, Homo sapiens
  misc_feature (1)...(504): n=a,t,g or c
tnnannnaannaaagagntcagcctttattgtgggctcagaagggcacaagagcagaacatgcagaggactggcagcactctggcctggcatcacnanggagngcagcagcaggcacccatgcagctcagcagcctcacttgctgcacttcctgggggagcatttgcactccatggcattgagaacctcatggtacacaacagagccattggtgcagtgcagggccacctcatnggggctccgtccgtntcggagagcagcaggagcactggtcctgcacatcgttgatgtcaatgggagtacatggcttttctgggcacattttgccctgggcagttagtgggatatccaccttnttactttcagactttacagctttccccaccttttgacatacttgcagcctgggcagttnattttcgtttncacttcaggcttcctcacatgtnttcacagcaggtncctgggntttttcataatttttacctcccttnaggccagaca

SEQ ID NO: 493 - DNA, 273 bp, Homo sapiens
  misc_feature (1)...(273): n=a,t,g or c
gattccacaaggatttattggcaccggacctagcctggnnccgccccttcaaggaaagacactaacaaggaggagtgccggcaccgcaagagccctcccagaagcgcccagactgggggtcggggaggacgctgccattcgtggccaggaagggaagggcgattccggagaggngtgggcacggcgcagggaaaggccggntggtnggntnggcagggaggcggggtaccngccccttaagaaaggggaactcgcagacntagtagagacgcc

SEQ ID NO: 494 - DNA, 406 bp, Homo sapiens
  misc_feature (1)...(406): n=a,t,g or c
ttaaactacacacacagtttattaaatagtgaaatggttaacaaaggcacatcaataaccacttactatatatacagaaatatatataattaacatggatccaattatctcataactgccattttttccaacaaagagtcattcaattcttcatgtcatgaaggntaaaggcaaagtcttagtccccatcttatgctttcccaccctcttcttgaaaactacattgaacctctatggggttaatcagcgtcttctgtagccataaggtctctgcaagcatgctgactgcaggctcctcagattctttctccattccctcaaggtccagtttttaatggaacagggctgtttgctttagcagggtgctggttgctgggtatttcatccaggttnacactatggattt

SEQ ID NO: 495 - DNA, 421 bp, Homo sapiens
  misc_feature (1)...(421): n=a,t,g or c
tttcanttttatttttttaaatgtcccaggctgcctttcctgtcctcccatcctgcatcctgctttctgttccctggataccgtaggatggttttatttcagttcatgcacaaattagtctggacactgtggagtcataacaagagtgggatggaggttccagggccaatcagtttctttggagggaagcttgagaagtaggttagagcaatgcccacaaaagccactgcttctccttcccatccccagcaatgagctaagagccaacctcagccagagagagggtctttgatcacagagggtcantcagtggggatntgattagtggggtttnggggatgggagtcccagggttaaaccagaggggcaaagggntccctcttgaggtcctgggctttaaggggaattggggttttcaaat

SEQ ID NO: 496 - DNA, 413 bp, Homo sapiens
  misc_feature (1)...(413): n=a,t,g or c
ctgtttttanngatgtttttaattgacaataattgtagatattcatcggatacacagtgatgttttgatacatgggatgtctagtgatcaaatcagggtaatgagcatatcatcatctcaagcgtttattatgtgtgttgagaatgttcaatatcctccttcttgctgcttgaaactatataatatatggtcaggagtttgtttttccgtcgtcatttgtaaccgttaacattaggatctgtgagcgtgttttctagttattctgctttattttcctctgctcctgaccgccgttgggatagctgaggatttcctccggatgggcagaagctcggcctgccttatggcttccgtaggctgaacactgtggtcttcactgaggcngggatgaggtgattnggtacctgccaggg

SEQ ID NO: 497 - DNA, 429 bp, Homo sapiens
  misc_feature (1)...(429): n=a,t,g or c
tttnntnntcaaccttttaatcaacactatttggttaaacaagagagcatcttccagggcgatttaggagaaaattttcttaaaagtaattccctttagataaaatcaatattgctgtattagtcagaggttctgtgaaatcttggtaaggtgtactggatagcagaaacagcatactggttcccgcccatctggctgaccactctcggtgtatgtgttaggaacttttctgggtgctggatgcaataatgaatgggttcttctgcatctctcttcaaatgctaggaaacttccntatatcttggggagccaagnatggcccgaatagggaacnagctccggtatacagcctcccngcgtgcggnccgcaggaaggacaggtgatttctgccatttccctctgagggtacccnggttcnatctnactaa

SEQ ID NO: 498 - DNA, 952 bp, Homo sapiens
tgaactctggatgctgttagcctgagactcaggaagacaacttctgcagggtcactccctggcttctggaggaaagagaaggagggcagtgctccagtggtacagaagtgagacataatggaatcaggcttcacctccaaggacacctatctaagccattttaaccctcgggattacctagaaaaatattacaagtttggttctaggcactctgcagaaagccagattcttaagcaccttctgaaaaatcttttcaagatattctgcctagacggtgtgaagggagacctgctgattgacatcggctctggccccactatctatcagctcctctctgcttgtgaatcctttaaggagatcgtcgtcactgactactcagaccagaacctgcaggagctggagaagtggctgaagaaagagccagaggcctttgactggtccccagtggtgacctatgtgtgtgatcttgaagggaacagagtcaagggtccagagaaggaggagaagttgagacaggcggtcaagcaggtgctgaagtgtgatgtgactcagagccagccactgggggccgtccccttacccccggctgactgcgtgctcagcacactgtgtctggatgccgcctgcccagacctccccacctactgcagggcgctcaggaacctcggcagcctactgaagccagggggcttcctggtgatcatggatgcgctcaagagcagctactacatgattggtgagcagaagttctccagcctccccctgggccgggaggcagtagaggctgctgtgaaagaggctggctacacaatcgaatggtttgaggtgatctcgcaaagttattcttccaccatggccaacaacgaaggacttttctccctggtggcgaggaagctgagcagacccctgtgatgcctgtgacctcaattaaagcaattcctttgacctgtca

SEQ ID NO: 499 - DNA, 2814 bp, Homo sapiens
aagaacgcccccaaaatctgtttctaattttacagaaatcttttgaaacttggcacggtattcaaaagtccgtggaaagaaaaaaaccttgtcctggcttcagcttccaactacaaagacagacttggtccttttcaacggttttcacagatccagtgacccacgctctgaagacagaattagctaactttcaaaaacatctggaaaaatgaagacttgggtaaaaatcgtatttggagttgccacctctgctgtgcttgccttattggtgatgtgcattgtcttacgcccttcaagagttcataactctgaagaaaatacaatgagagcactcacactgaaggatattttaaatggaacattttcttataaaacattttttccaaactggatttcaggacaagaatatcttcatcaatctgcagataacaatatagtactttataatattgaaacaggacaatcatataccattttgagtaatagaaccatgaaaagtgtgaatgcttcaaattacggcttatcacctgatcggcaatttgtatatctagaaagtgattattcaaagctttggagatactcttacacagcaacatattacatctatgaccttagcaatggagaatttgtaagaggaaatgagcttcctcgtccaattcagtatttatgctggtcgcctgttgggagtaaattagcatatgtctatcaaaacaatatctatttgaaacaaagaccaggagatccaccttttcaaataacatttaatggaagagaaaataaaatatttaatggaatcccagactgggtttatgaagaggaaatgcttcctacaaaatatgctctctggtggtctcctaatggaaaatttttggcatatgcggaatttaatgataaggatataccagttattgcctattcctattatggcgatgaacaatatcctagaacaataaatattccatacccaaaggctggagctaagaatcccgttgttcggatatttattatcgataccacttaccctgcgtatgtaggtccccaggaagtgcctgttccagcaatgatagcctcaagtgattattatttcagttggctcacgtgggttactgatgaacgagtatgtttgcagtggctaaaaagagtccagaatgtttcggtcctgtctatatgtgacttcagggaagactggcagacatgggattgtccaaagacccaggagcatatagaagaaagcagaactggatgggctggtggattctttgtttcaagaccagttttcagctatgatgccatttcgtactacaaaatatttagtgacaaggatggctacaaacatattcactatatcaaagacactgtggaaaatgctattcaaattacaagtggcaagtgggaggccataaatatattcagagtaacacaggattcactgttttattctagcaatgaatttgaagaataccctggaagaagaaacatctacagaattagcattggaagctatcctccaagcaagaagtgtgttacttgccatctaaggaaagaaaggtgccaatattacacagcaagtttcagcgactacgccaagtactatgcacttgtctgctacggcccaggcatccccatttccacccttcatgatggacgcactgatcaagaaattaaaatcctggaagaaaacaaggaattggaaaatgctttgaaaaatatccagctgcctaaagaggaaattaagaaacttgaagtagatgaaattactttatggtacaagatgattcttcctcctcaatttgacagatcaaagaagtatcccttgctaattcaagtgtatggtggtccctgcagtcagagtgtaaggtctgtatttgctgttaattggatatcttatcttgcaagtaaggaagggatggtcattgccttggtggatggtcgaggaacagctttccaaggtgacaaactcctctatgcagtgtatcgaaagctgggtgtttatgaagttgaagaccagattacagctgtcagaaaattcatagaaatgggtttcattgatgaaaaaagaatagccatatggggctggtcctatggaggatacgtttcatcactggcccttgcatctggaactggtcttttcaaatgtggtatagcagtggctccagtctccagctgggaatattacgcgtctgtctacacagagagattcatgggtctcccaacaaaggatgataatcttgagcactataagaattcaactgtgatggcaagagcagaatatttcagaaatgtagactatcttctcatccacggaacagcagatgataatgtgcactttcaaaactcagcacagattgctaaagctctggttaatgcacaagtggatttccaggcaatgtggtactctgaccagaaccacggcttatccggcctgtccacgaaccacttatacacccacatgacccacttcctaaagcagtgtttctctttgtcagactaaaaacgatgcagatgcaagcctgtatcagaatctgaaaaccttatataaacccctcagacagtttgcttattttattttttatgttgtaaaatgctagtataaacaaacaaattaatgttgttctaaaggctgttaaaaaaaagatgaggactcagaagttcaagctaaatattgtttacattttctggtactctgtgaaagaagagaaaagggagtcatgcattttgctttggacacagtgttttatcacctgttcatttgaagaaaaataataaagtcagaagttcaaaaaaaaaaaaaaaaaaaaaaaaagcggccgctcg

SEQ ID NO: 500 - DNA, 1042 bp, Homo sapiens
ggcttgggaaggggaaggaaacttctctgaaatctgaacacctgctctcccggcaaggaaacttcgaaggctgaccgaccaagaccatcactatgaccgatggagactatgattatctgatcaaactcctggccctcggggattcaggggtggggaagacaacatttctttatagatacacagataataaattcaatcccaaattcatcactacagtaggaatagactttcgggaaaaacgtgtggtttataatgcacaaggaccgaatggatcttcagggaaagcatttaaagtgcatcttcagctttgggacactgcgggacaagagcggttccggagtctcaccactgcatttttcagagacgccatgggcttcttattaatgtttgacctcaccagtcaacagagcttcttaaatgtcagaaactggatgagccaactgcaagcaaatgcttattgtgaaaatccagatatagtattaattggcaacaaggcagacctaccagatcagagggaagtcaatgaacggcaagctcgggaactggctgacaaatatggcataccatattttgaaacaagtgcagcaactggacagaatgtggagaaagctgtagaaacccttttggacttaatcatgaagcgaatggaacagtgtgtggagaagacacaaatccctgatactgtcaatggtggaaattctggaaacttggatggggaaaagccaccagagaagaaatgtatctgctagactctacatagaaactgaacatcaagaaccccaccaaaatattacttttaaaacaatgacaaaccacacaattgttgttgagtaaaccacgcacaatggcatgtctttctttttctgccagaaaatctattttaagaaaccagaatagtcaacagtgttcaaaagaattgactagttatccctgaggccctttcaaacatgatcaaagatttcccaatgtgatctcatcatcatggatactcaatttgttttttcttatagagaaaatgagtatatagacatatacagagaat

SEQ ID NO: 501 - DNA, 1506 bp, Homo sapiens
aggcggacaaagcccgattgttcctgggccctttccccatcgcgcctgggcctgctccccagcccggggcaggggcgggggccagtgtggtgacacacgctgtagctgtctccccggctggctggctcgctctctcctggggacacagaggtcggcaggcagcacacagagggacctacgggcagctgttccttcccccgactcaagaatccccggaggcccggaggcctgcagcaggagcggccatgaagaagctgatggtggtgctgagtctgattgctgcagcctgggcagaggagcagaataagttggtgcatggcggaccctgcgacaagacatctcacccctaccaagctgccctctacacctcgggccacttgctctgtggtggggtccttatccatccactgtgggtcctcacagctgcccactgcaaaaaaccgaatcttcaggtcttcctggggaagcataaccttcggcaaagggagagttcccaggagcagagttctgttgtccgggctgtgatccaccctgactatgatgccgccagccatgaccaggacatcatgctgttgcgcctggcacgcccagccaaactctctgaactcatccagccccttcccctggagagggactgctcagccaacaccaccagctgccacatcctgggctggggcaagacagcagatggtgatttccctgacaccatccagtgtgcatacatccacctggtgtcccgtgaggagtgtgagcatgcctaccctggccagatcacccagaacatgttgtgtgctggggatgagaagtacgggaaggattcctgccagggtgattctgggggtccgctggtatgtggagaccacctccgaggccttgtgtcatggggtaacatcccctgtggatcaaaggagaagccaggagtctacaccaacgtctgcagatacacgaactggatccaaaaaaccattcaggccaagtgaccctgacatgtgacatctacctcccgacctaccaccccactggctggttccagaacgtctctcacctagaccttgcctcccctcctctcctgcccagctctgaccctgatgcttaataaacgcagcgacgtgagggtcctgattctccctggttttaccccagctccatccttgcatcactggggaggacgtgatgagtgaggacttgggtcctcggtcttacccccaccactaagagaatacaggaaaatcccttctaggcatctcctctccccaacccttccacacgtttgatttcttcctgcagaggcccagccacgtgtctggaatcccagctccgctgcttactgtcggtgtccccttgggatgtacctttcttcactgcagatttctcacctgtaagatgaagataaggatgatacagtctccatcaggcagtggctgttggaaagatttaagatttcacacctatgacatacatgggatagcacctgggccgccatgcactcaataaagaatgtatttt

SEQ ID NO: 502 - DNA, 1670 bp, Homo sapiens
ggcgggagggccgcagctccggcgccgcgccgtcccgccagaacgatcgccgcggccggaagagttggcgctcggggcggactccttggaactggcttagcgcacccatcccaccttcccgcaccctgggaccggtccaacgagcgctcctccaagcggagccttggagggcacggccggcaccattacctccaacgagtggagctctcccacctcccctgaggggagcaccgcctctgggggcagtcaggcactggacaagcccatcgacaatgacggagagggcgtgtggagcccggatattgagcagagtttccaggaggccctcgccatctacccgccctgtggcaggcgcaaaatcatcctgtcggacgagggcaagatgtatggtcgaaacgagctgattgcccgctacatcaagctccggacagggaagacccgcaccaggaagcaggtctccagccacatccaggtgctggctcgtcgcaaagctcgcgagatccaggccaagctaaaggaccaggcagctaaggacaaggccctgcagagcatggctgccatgtcgtctgcacagatcatctccgccacggccttccacagtagcatgcgcctcgcccggggccccggccgcccagcagtctcagggttttggcaaggagctttgccaggccaagccgaaacgtcccatgatgtgaagcctttctctcagcaaacctatgctgtccagcctccgctgcctctgccagggtttgagtctcctgcagggcccgccccatcgccctctgcgcccccggcacccccatggcagggccgcaggcgtggcagctccaagctctggatgttggagttctctgccttcctggagcagcagcaggacccggacacgtacaacaagcacctgttcgtgcacattggccagtccagcccaagctacctgcgcccctacctcgaagccgtggacatccgccaaatctatgacaaattcccggagaaaaagggtggactcaaggatctcttcgaacggggaccctccaatgccttttttcttgtgaagttctgggcagacctcaacaccaacatcgaggatgaaggcagctccttctatggggtctccagccagtatgagagccccgagaacatgatcatcacctgctccacgaaggtctgctctttcggcaagcaggtggtggagaaagttgagacagagtatgctcgctatgagaatggacactactcttaccgcatccaccggtccccgctctgtgagtacatgatcaacttcatccacaagctcaagcacctccctgagaagtacatgatgaacagcgtgctggagaacttcaccatcctgcaggtggtcaccaacagagacacacaggagaccttgctgtgcattgcctatgtctttgaggtgtcagccagtgagcacggggctcagcaccacatctacaggctggtgaaagaatgagagactcggggagcagggaggggggaagagacgtgtgtgcaggaaacggggacgtggggaggggacctgcaggggccagccccctgaagtgccaagagagctgagaggagcagttgtgactctacccaggaacaaactgtgcctgaacctgaggtgcccaaccccaaataaacccaagatgctgtgtattttcagaggaaaa

SEQ ID NO: 503 - DNA, 2066 bp, Homo sapiens
tcgcgctggagggcagccgcttagcgtgcgctcttgtccccgcaggtcgcagccaggcggcgggcgcgcccagccccggcccctggagcgcccgccgcggtccccacctccatggacgccttcaaggggggcatgagcctggagcggctgccggaggggttccggccgccgccgccgccaccccatgacatggggcccgccttccacctggcccggcccgccgacccccgcgagccgctcgagaactccgccagcgagtcgtctgacacggagctgccagagaaggagcgcggcggggaacccaaggggcccgaggacagtggtgcgggaggcacgggctgcggcggcgcagacgacccagccaagaagaagaagcagcggcggcaacgtacgcacttcacaagccagcagttgcaagagctagaggccacgttccagaggaaccgctaccccgacatgagcatgagggaggagatcgccgtgtggaccaacctcaccgagccgcgcgtgcgggtctggttcaagaacaggcgagccaagtggcgtaagcgcgagcgtaaccagcagctggacctgtgcaagggtggctacgtgccgcagttcagcggcctagtgcagccctacgaggacgtgtacgccgccggctactcctacaacaactgggccgccaagagcctggcgccagcgccgctctccaccaagagcttcaccttcttcaactccatgagcccgctgtcgtcgcagtccatgttctcagcacccagctccatctcctccatgaccatgccgtccagcatgggcccaggcgccgtgcctggcatgcccaactcgggcctcaacaacatcaacaacctcaccggctcctcgctcaactcggccatgtcgccgggcgcttgcccgtacggcactcccgcctcgccctacagcgtctaccgggacacgtgcaactcgagcctagccagcctgcggctcaagtccaaacagcactcgtcgtttggctacggcggcctgcagggcccggcctcgggcctcaacgcgtgccagtacaacagctgaccgccccgccgcaccacgcgggccggcggccggagcggggaagggcgcgggcgcggaggacgcacgcggggccccggctcgcaagccccagctcaccgcgccgcggacctcacacctgcgcagccccctcctcccacttcccactccgggttggttttgtgtttgcttttccggaccccactctgccctccaaaaagacaaaaaaaaaaaaaaaaaaaaaagcaaaaagacgtcggagaaaagtgccgcgaaaaaatggatgagttgcaatttctctcgggatggcgcgggtggtgtgtgtgtgttcccacgggccccggaggcccactccgcggagggcacgcggcgcggtaggcaagcgccgaggcccagcggccgggggaggacaacctcgtatcccgcgcccccgccgcgctggatccggactgagcggccgggcctgcggactggatgtgcggggcctggacttgcctaggatttcccgaccccgtacaaaccaagttgccctctccgagctaggcccggccgagagcgccttaactcgagtcggatccgtgttggggcgggcgttgggtttggggggacggtgcccccagcccaggatcgggcactcagtggagccgcacacggcccggcgcgcctggtagagcctcgctggccccgcgccccggagccctatattaaggccacggagcgacagcgggcagtgcgggcctggcgggaggtgggggaggtccatctcagaacaccccagccttgagcttagctgcaggcccaggccctctgctctgctcccgggctaggaggtggccctctgtctgggcgaacagccccctcctcaccgcccgccgtgcaagagtcgagccggcagagcaaggggcgcggccccagggccctgcgcccactttgcacacccgctctccggcccgcgcccctgtttacagcgtccctgtgtatgttggactgactgtaataaatctgtctatatcgactaaaaaaaaaaaaaaaaa

SEQ ID NO: 504 - DNA, 450 bp, Homo sapiens
  misc_feature (1)...(450): n=a,t,g or c
ttttgaaaaaataaagaactatcaggattgaaaacagctcttttgaggaatgtcaattagttattaagttgaaagtaattaatgattttatgtttggttactctactagatttgataaaaattgtgcctttagccttctatatacatcagtggaaacttaagatgcagtaattatgttccagattgaccatgaataaaatattttttaatctaaatgtagagaagttgggattaaaagcagtctcggaaacacagagccaggaatatagccttttggcatggtgccatggctcacatctgtaatcccagcacttttggaggctgaggcgggtggattgcttgaggccaggagttccgagaccaagcctggcccaaccgtggtgaaacactggtcccctactaaaataccaaaaaaataagggctggggcgccgttgctcacgcctgtaan

SEQ ID NO: 505 - DNA, 560 bp, Homo sapiens
  misc_feature (1)...(560): n=a,t,g or c
nnnnnnnnnnngnttnnnnnnnnnnccttnangggntnntactcncatntcattgtccagtaccgcttcnggccnncagaatacncattttcttcactcacatacncnacccctcacatcagcattggtgcactagactctgtaaaaatttttcagtcacacttttggtttttaaacttgagtcaatataaaccttgttcaaaatgttatgaaaaaatgtacatgtttatacaaggcaggttgtggcaggacactaggggttctccccacttgggtggccccaggaggagaggctggagtctcagtttgtatctcttatctcctcccaccacccttcccacccagtcccccaggaaccagcagcgccctgccccctagtgagtgtactcacacccctattccctggggaagcagntagttgacctnnggcatttnccccacanccctggnggannggagncaggntcagncaggncctctcccnngnaattgtncgccccnctnggccaanncaangggnggntnntctntncaggtngggnccangggggggncaantt

SEQ ID NO: 506 - DNA, 490 bp, Homo sapiens
  misc_feature (1)...(490): n=a,t,g or c
tnnnncagccgggaggataccaggatagacgctatgactgaggctgatgtgaatccaaaggcctatccccttgccgatgcccacctcaccaagaagctactggacctcgttcagcagtcatgtaactataagcagcttcggaaaggagccaatgaggccaccaaaaccctcaacaggggcatctctgagttcatcgtgatggntgcagacgccgagccactggagatcattctgcacctgccgntggtgtgtgaagacaagaatgtgccctacgtgttttngggctccaagcaggccctggggagagnctgtngggtctccaggnctgtcatcggctgttctntcaacatcaaagaagggtcgcaggttgaaaacaggagatccaatccattcaggaggccattgaaaggntcttaggcttaacctgtggggctctncangttntccctnccagttccccccagagnngattcaanttgggnttaccagg

SEQ ID NO: 507 - DNA, 560 bp, Homo sapiens
  misc_feature (1)...(560): n=a,t,g or c
nnnnnnnnnctnttaacgatcggtaatgcctttattaacgagaatgaaacgttcattcctccttccactccttctcgttggttttctggacacagctcacctgatcctgctagaaacgttgtcagtctgcttgtggcttccctccttgattgactcacgctgtgtgatgtctggagaagtatctatccacttcatgtgaatgagcactccaatatcagccaacatcaatcattcttaccatgtcacttcccatcatggaaccactcatggttgctggtggaacgccaggattagnttcataacctatgccaccaccacctcctagaggtggaaatttctggcctcctgaaccatagggatctcccatgttcatngntcctccgccgcccattcgggtgtaactttcctctcttggggggctcattnggntcttccatctcacgggggacgaatcatcatctnttccctcttcttctacggngggncccncctcttggctcaaatnggatttcttnaaggtttctgnattcttggatnggggaggtcttcccgangggatt

SEQ ID NO: 508 - DNA, 244 bp, Homo sapiens
ttttttttttttacatttgcgttggcaatgtttaatgtttcacttttgcagaactgaaatttgtattcaaaggcacagaaggaaggaaaggcagttatcagagcatgaagtcacagataaaggatgctgaataaaagcataggactgctcctctttagccttaggaaaataaataatgcagtattaaactagatttttatttttattatatttccatgtgaagacatcacccaaatgtcagcgg

SEQ ID NO: 509 - DNA, 400 bp, Homo sapiens
gtttttaaacactgtatttttaatttttcaaaaatacgacagtaaaggtcgtactatgcacagggggactgatgcctttcatgtgtcccccttgcatttctacctcaaaacaagactaaggcataaattactccactgggcgccaggcacgccccttgtccttggggcattatcactggtcataccacttgtcctgggggccggcagatgagatatttgccaccaaggctgcacaggctccgggagtccttgcacgtgctttattcagtgcattccagaggggacccctcaacagcgctggccaagcccttccctgtgcactggcgggcatgagggaaggatgggaggcagtgtgtgtgtgtgtgtgtgtgtgtgtgtgtgtgtgtgtgtgtgtgtgtgt

SEQ ID NO: 510 - DNA, 276 bp, Homo sapiens
attggtttaatcttttatttggaacaaaggaaaaaaggactgacaccagtttagcctttgagtgtgcagagctctgccctccctcccacccctcagccccaaatccaagatttcatagccctaacacccacccaagcagcttccctcacacatgccctttgttttcttcctctcttctatggttccttagggaaaggagccttctttagggatgaaaagctaactacagcccagtctggcctccagcagcccagggtcagctcagcctccactgga

SEQ ID NO: 511 - DNA, 327 bp, Homo sapiens
ctggaaggaacggatgggcctctagtgacagatccagagacacacaagagcaccaaagcagctcatcccactgatgacaccacgacgctctctgagagaccatccccaagcacagacgtccagacagacccccagaccctcaagccatctggttttcatgaggatgaccccttcttctatgatgaacacaccctccggaaacgggggctgttggtcgcagctgtgctgttcatcacaggcatcatcatcctcaccagtggcaagtgcaggcagctgtcccggttatgccggaatcattgcaggtgagtccatcagaaacagggagct

SEQ ID NO: 512 - DNA, 406 bp, Homo sapiens
  misc_feature (1)...(406): n=a,t,g or c
tnncagatttngcagcacttttaatacacaaagcaaaaggtaataggctggatgggtnaccaaccttcattcacatanagagnccaagtatagatacagactaattgggaaataagttagagtttgnagggccttagggtcgagagcagaaacactctccttttggcagccatggaagcnnnnanttccttttctggtntcagtgcatgtacgccttcggtcgctccatagcctggtgtgcctgcagcacggccactgcctcgtctatcttggcatggacgggattctggagactccagcatgagcaacagctccgagttgtcaatctccagcagcatgcccgtggatcttgccagccagctggggtgtggacatcatggataaaggggggtagagacgctnccca

SEQ ID NO: 513 - DNA, 7258 bp, Homo sapiens
ttcaataggaagcaccaacagtttatgccctaggactttgttcccacaatcctgtaacatcatatcacgacacctaacccaatccttatcaagccctgtcaaaaacggactttaaaccaagctgcaaattttcagtaatctggccttgcctttccccctctgatagcaccatcaaacaaacccccttactgccgaaagcaataagcccggctttgttccatccactggttgtgttggtgatatctggggactgccactgaacagacgcacagagggagcccctacaggcaggggtttttctgtctgtgcttcttgggagagtatgtctcgtacatttgtcgcgtgatgaagacttcacagctccatccagcgaccagactcacagctccatccagctgcggcaagggggtctgaggcagtcttaggcaagttggggcccagcgggagaagttgcagaagaactgattagaggacccaggaggcttcagagctgggctgaggtagagagtctcctgtgcgccttctctcctctctgcaattcggggactccttgcactggggcaggccccggcaggtgcatgggaggaagcacggagaatttacaagcctctcgattcctcagtccagacgctgttgggtcccctccgctggagatcgcgcttcccccaaatctttgtgagcgttgcggaagcacgcggggtccgggtcgctgagcgctgcaagacaggggagggagccgggcgggagagggaggggcggcgccggggcgggccctgatatagagcaggcgccgcgggtcgcagcacagtcggagaccgcagcccggagcccgggccagggtccacctgtccccgcagcgccggctcgcgccctcctgccgcagccaccggtgagtgccgcggtcctgagatccccgggccggatgcgcggcggccccagctcccgagcgtctgcctgccccgccctgggctgcccgggctccctgggctccccggcggctgcacggagtcaaggcgccccgtcccgggcgtcccccgcgggtgccgatccaggctgcccggagtccggagcccatagaggagagagacagctggggagcctggtcaccgcgggcatctcccctgcgctgcagtcgcccgcctggcctgccttcccgttcctccgcctcttgccctgacttctccttcctttgcagagccgccgtctagcgccccgacctcgccaccatgagagccctgctggcgcgcctgcttctctgcgtcctggtcgtgagcgactccaaagtgagtgcgctcttgctttgactgatgctgcccaaggacctctgatcagcaccaggggagaggaggggctgctcagggagctggggtctccggattccatccacagcagggccagactctccccaggaaatgggacagggtggcagcggaggcttgagaaccacgggggttggcactggctggcaagggaggaagagggccaccgggactgccccagcctgcgggcatctggtagatgaagcttaatccatttctcctggctggaaaccatggtcttccatttgagaactagatacgaacagggtgaggcgagagggagagggaagagtgggttttgggattggggccagtttaccctcaccctggatccctggagcatgggacctttgatgaagcctcctcccgaatctcttccagggcagcaatgaacttcatcaagttccatgtgagtatccacccctacaacagttggctgcacagacaagttgggaaggcttcaggggacactcccctccctgccctctgctgcagcgtgcgccaccccttaccacttccactccccctcgcttaccccacctttgttctctccagcgaactgtgactgtctaaatggaggaacatgtgtgtccaacaagtacttctccaacattcactggtgcaactgcccaaagaaattcggagggcagcactgtgaaataggtatggggatctccactgcaactgggagagaaatttggggacagggagggatgggtgggaggcaagagcaggcaggagttaggagctggaggtagggtgggtgacatcttcatccctatgtgacaagcataaacacacacacacgctcacgaaacagtggccacacaaatgtgaggtggggttggaaggagaccctgtccagtcttctggcaggtctgaaacgacatctttaaaatgtccgttggcagccgggcatggtggctcacgcttgtaatcccagcattttgagaggtcaagtttgagtggatcatttaggtcaggagttcaagaccagcctggacaacatggtgtaaccctgcctctactaaaaatgcaaaaatcagcctggcatggtggtggatgcctgtagtcccagctacttgggaggctgaggcaggagaattgcttgaacatgggaggccagatctcagtgagctgagatcacaccactgcactccaactgggcgacagagcaagactccatctcaaaaaaaaaaaaaaataaaagttagttggaatgttcttctctttctcatattctctcatcctcctgtccccttgtagataagtcaaaaacctgctatgaggggaatggtcacttttaccgaggaaaggccagcactgacaccatgggccggccctgcctgccctggaactctgccactgtccttcagcaaacgtaccatgcccacagatctgatgctcttcagctgggcctggggaaacataattactgcaggtgaggtgggggcaacaaggaccaaaagccctccctacagcttcccagaaaccttgttaccatccccttctcccagagggctggccatagcacaagagaagtgcggcctctggttgagtcttccctgaggggaggaggcagggaaggccctctgggttggaatgacatcccctatctttctgtgttgtgccaggaacccagacaaccggaggcgaccctggtgctatgtgcaggtgggcctaaagccgcttgtccaagagtgcatggtgcatgactgcgcagatggtgagcatcactgacctgctgatgacaggtgggtggaaggggacaaacttacatgtccccttattccatcacaggaggactgaggaggtggggggtgcccgagagggatgctttctcctacctgcctccctaagacatccctctgtttgtcctccaggaaaaaagccctcctctcctccagaagaattaaaatttcagtgtggccaaaagactctgaggccccgctttaagattattgggggagaattcaccaccatcgagaaccagccctggtttgcggccatctacaggaggcaccgggggggctctgtcacctacgtgtgtggaggcagcctcatgagcccttgctgggtgatcagcgccacacactgcttcatgtacggccctgggtttctcctcttcgactcttctgccccaccccaagcacatccctttctccttcccagcaaagtgttccgcctcatttctccctcatctgcccctgtccatgcgcccatggccttggggacaagtcgtgctttgaggcctctagggagggaaggaagaagtggcatgatttcatgggactaagctgtttgatgggtatcttcttccacagtgattacccaaagaaggaggactacatcgtctacctgggtcgctcaaggcttaactccaacacgcaaggggagatgaagtttgaggtggaaaacctcatcctacacaaggactacagcgctgacacgcttgctcaccacaacgacattggtgagggggaacgcccgcgactactgtggccataatggcttggggagagtgggacccagggagagactggagctgagttgaagctgccggtggggcaggggtggggcgagggaccttgaagcctcgatatacatgacaaaggatggcagggaagagttccatgaagtctgaggggcctggtgctcctctggagagaccctgaatttccccaacaagtagccctcttgcgagtggaaacagccctgtgggtatatggcttgggctgggaaggccctgtttatatgaattagaaaaagacacaccttcctttgtgggatgcagcctctgtctgtgctaggatatagaacttggagaatggagccttgggatggattccagcctaactacctcagggggatcctctagagtgcagctgggagtttttgcagaaacgacctgtacagctgtatgcagtggctctggccatccaagcctttttcaacacctggaacaaagcccttggggcatggggcaggggaggtttccaggtgataagcgaccagcagacctccctggatgactgacctagggataggcatagctacttcctcggcacttggaggggacagatggggaccgcctaaccagtagtgatctttctcctctgaccctctgtcctcccccagccttgctgaagatccgttccaaggagggcaggtgtgcgcagccatcccggactatacagaccatctgcctgccctcgatgtataacgatccccagtttggcacaagctgtgagatcactggctttggaaaagagaattctagtaagtgacaattgcgactgacttagaaggtcctgaggagtgttttgacctgaaaatgagcccagtgtgatcaagggaagactgcagagttagaggtgggagcactgaggcggtggcagatgggtccagggatggatgaagagtgttgtttagggagcgatgggctgcaaaggtaaatagatggtaggggctataggtggaggtaaatggctcagatttgcatggagagagaataatgggcctctccctgggtgatgatactttatggtgtcccctctctggcgagacgtcccacgtggaggcagataaatcttgatgcaaacgcctccctgttttctccacctagccgactatctctatccggagcagctgaaaatgactgttgtgaagctgatttcccaccgggagtgtcagcagccccactactacggctctgaagtcaccaccaaaatgctgtgtgctgctgacccacagtggaaaacagattcctgccaggtgagtgttccaagcatctctctccacctcttccatatctccccagagctcctgggcttgttccagccagcttaagggtgtctctctctagccaaagccctaagtagccagaatcaggagctcaggtctttgagggtttaaaccagtccttatgtgtttgccagacattaccaaaaaaatcccagctctgcgctagtcacttcagactgggggcacgagatcctagaaagaggaaacagtaaaagacaatgtaactcagtgcccagggtgtgttgtgaactataaatgatcaggtgttcaggagagggaggtgagtgccaacctgagggtcagggaggggaggctttaaaggaaatgtgacttgataggcatttgaagaggcagagggaagaaaggaaggtgtttcagttgaaagatacaaaactgagaaggaggctggcatattccgggtggggaggagaactagggtctgggagtgtggatggaatagtggcagatgacagggcttttaaagccaagcaggggattttccaacttcgatgtggtagaaatggggctgcgtcaggcacagtggctcatgcctgtaatcccagcattgggctaggccgtagtcgatggatcattgaggccagagttgagaccggcctggaccaacatggtgaaaccctgtgtctactaaaaaatgcaaaaaaaaaaattagccaggtgtggtggtgcctgcctgtaatcccagctaatcaggaggctgagacatggaatcgcttgagcacaggaggcaagtttgacgtgagctgagatcacgtcattgcacgccagcctgggcgacagagcgagattctgtcctcccgccgaaaaaagaaagaaaatgggaagtcgctaaggactttgactgggaaactcttccctctctctggtatggttgggtgatgggatcagaaatcccctcctcacttctctagggctcatcttttgtatctttggcgtcacagggagactcagggggacccctcgtctgttccctccaaggccgcatgactttgactggaattgtgagctggggccgtggatgtgccctgaaggacaagccaggcgtctacacgagagtctcacacttcttaccctggatccgcagtcacaccaaggaagagaatggcctggccctctgagggtccccagggaggaaacgggcaccacccgctttcttgctggttgtcatttttgcagtagagtcatctccatcagctgtaagaagagactgggaagataggctctgcacagatggatttgcctgtgccacccaccagggtgaacgacaatagctttaccctcaggcataggcctgggtgctggctgcccagacccctctggccaggatggaggggtggtcctgactcaacatgttactgaccagcaacttgtctttttctggactgaagcctgcaggagttaaaaagggcagggcatctcctgtgcatgggtgaagggagagccagctcccccgacggtgggcatttgtgaggcccatggttgagaaatgaataatttcccaattaggaagtgtaacagctgaggtctcttgagggagcttagccaatgtgggagcagcggtttggggagcagagacactaacgacttcagggcagggctctgatattccatgaatgtatcaggaaatatatatgtgtgtgtatgtttgcacacttgtgtgtgggctgtgagtgtaagtgtgagtaagagctggtgtctgattgttaagtctaaatatttccttaaactgtgtggactgtgatgccacacagagtggtctttctggagaggttataggtcactcctggggcctcttgggtcccccacgtgacagtgcctgggaatgtacttattctgcagcatgacctgtgaccagcactgtctcagtttcactttcacatagatgtccctttcttggccagttatcccttccttttagcctagttcatccaatcctcactgggtggggtgaggaccactccttacactgaatatttatatttcactatttttatttatatttttgtaattttaaataaaagtgatcaataaaatgtgatttttctgatgacaaatctccctggtgcttgtatgggaaggagttggagtacataaaaaggagaaaataacaaaggtgg

SEQ ID NO: 514 - DNA, 988 bp, Homo sapiens
ctcgcacagcttcccgacgcgtctgctgagccccatggcccacgccacgctctccgccgcccccagcaatccccggctcctgcgggtggcgctgctgctcctgctcctggtggccgccagccggcgcgcagcaggagcgtccgtggtcactgaactgcgctgccagtgcttgcagacactgcagggaattcacctcaagaacatccaaagtgtgaatgtaaggtcccccggaccccactgcgcccaaaccgaagtcatagccacactcaagaatgggaagaaagcttgtctcaaccccgcatcccccatggttcagaaaatcatcgaaaagatactgaacaaggggagcaccaactgacaggagagaagtaagaagcttatcagcgtatcattgacacttcctgcagggtggtccctgcccttaccagagctgaaaatgaaaaagagaacagcagctttctagggacagctggaaaggacttaatgtgtttgactatttcttacgagggttctacttatttatgtatttatttttgaaagcttgtattttaatattttacatgctgttatttaaagatgtgagtgtgtttcatcaaacatagctcagtcctgattatttaattggaatatgatgggttttaaatgtgtcattaaactaatatttagtgggagaccataatgtgtcagccaccttgataaatgacagggtggggaactggagggtggggggattgaaatgcaagcaattagtggatcactgttagggtaagggaatgtatgtacacatctattttttatactttttttttaaaaaaagaatgtcagttgttatttattcaaattatctcacattatgtgttcaacatttttatgctgaagtttcccttagacattttatgtcttgcttgtagggcataatgccttgtttaatgtccattctgcagcgtttctctttcccttggaaaagagaatttatcattactgttac

SEQ ID NO: 515 - DNA, 1895 bp, Homo sapiens
gctttccagccccaaccatgcataaaaggggttcgcggatctcggagagccacagagcccgggccgcaggcacctcctcgccagctcttccgctcctctcacagccgccagacccgcctgctgagccccatggcccgcgctgctctctccgccgcccccagcaatccccggctcctgcgagtggcactgctgctcctgctcctggtagccgctggccggcgcgcagcaggtgggtaccggcgccctggggtccccgggccggacgcggctggggtaggcacccagcgccgacagcctcgctcagtcagtgagtctcttcttccctaggagcgtccgtggccactgaactgcgctgccagtgcttgcagaccctgcagggaattcaccccaagaacatccaaagtgtgaacgtgaagtcccccggaccccactgcgcccaaaccgaagtcatgtaagtcccgccccgcgctgcctctgccaccgccggggtcccagaccctcctgctgccccaaccctgtccccagcccgacctcctgcctcacgagattcccttccctctgcagagccacactcaagaatgggcggaaagcttgcctcaatcctgcatcccccatagttaagaaaatcatcgaaaagatgctgaacaggtgagttatggtttccatgtacacaggcgactggagccgttggtcagaaatactggcatgtgccccctaaaaataaaatcaggaaaacccaggggttagttgaaggactagaaattgggattattgttttcacaattaaggtttcctttacgataattactgctctggtgccagaggatattcccaatgcctggcgtccccaccctggttcttccttcgttccaatgaatgtaggtaaaactgccttcatttgaggcccagtaggacaaacagcaacaggttctggctgtttttaatccaatagtacagtggagaccaccgccccaccccacccccattcctaaaagagcatcccaagcttagaggtccctgccacacagcacagctgtcataggcagtagccacttggttgccaggctggggaaactgcattcggagaactctagaggctggaggagcagggcaggagaagagtgttgtgcaatcagctttcccgagcacctactcagggcacccattttctcattgcagtgacaaatccaactgaccagaagggaggaggaagctcactggtggctgttcctgaaggaggccctgcccttataggaacagaagaggaaagagagacacagctgcagaggccacctggattgtgcctaatgtgtttgagcatcgcttaggagaagtcttctatttatttatttattcattagttttgaagattctatgttaatattttaggtgtaaaataattaagggtatgattaactctacctgcacactgtcctattatattcattctttttgaaatgtcaaccccaagttagttcaatctggattcatatttaatttgaaggtagaatgttttcaaatgttctccagtcattatgttaatatttctgaggagcctgcaacatgccagccactgtgatagaggctggcggatccaagcaaatggccaatgagatcattgtgaaggcaggggaatgtatgtgcacatctgttttgtaactgtttagatgaatgtcagttgttatttattgaaatgatttcacagtgtgtggtcaacatttctcatgttgaaactttaagaactaaaatgttctaaatatcccttggacattttatgtctttcttgtaaggcatactgccttgtttaatggtagttttacagtgtttctggcttagaacaaaggggcttaattattgatgttttcatagagaatataaaaataaagcacttatag

SEQ ID NO: 516 - DNA, 1552 bp, Homo sapiens
gcccgtacacaccgtgtgctgggacaccccacagtcagccgcatggctcccctgtgccccagcccctggctccctctgttgatcccggcccctgctccaggcctcactgtgcaactgctgctgtcactgctgcttctgatgcctgtccatccccagaggttgccccggatgcaggaggattcccccttgggaggaggctcttctggggaagatgacccactgggcgaggaggatctgcccagtgaagaggattcacccagagaggaggatccacccggagaggaggatctacctggagaggaggatctacctggagaggaggatctacctgaagttaagcctaaatcagaagaagagggctccctgaagttagaggatctacctactgttgaggctcctggagatcctcaagaaccccagaataatgcccacagggacaaagaaggggatgaccagagtcattggcgctatggaggcgacccgccctggccccgggtgtccccagcctgcgcgggccgcttccagtccccggtggatatccgcccccagctcgccgccttctgcccggccctgcgccccctggaactcctgggcttccagctcccgccgctcccagaactgcgcctgcgcaacaatggccacagtgtgcaactgaccctgcctcctgggctagagatggctctgggtcccgggcgggagtaccgggctctgcagctgcatctgcactggggggctgcaggtcgtccgggctcggagcacactgtggaaggccaccgtttccctgccgagatccacgtggttcacctcagcaccgcctttgccagagttgacgaggccttggggcgcccgggaggcctggccgtgttggccgcctttctggaggagggcccggaagaaaacagtgcctatgagcagttgctgtctcgcttggaagaaatcgctgaggaaggctcagagactcaggtcccaggactggacatatctgcactcctgccctctgacttcagccgctacttccaatatgaggggtctctgactacaccgccctgtgcccagggtgtcatctggactgtgtttaaccagacagtgatgctgagtgctaagcagctccacaccctctctgacaccctgtggggacctggtgactctcggctacagctgaacttccgagcgacgcagcctttgaatgggcgagtgattgaggcctccttccctgctggagtggacagcagtcctcgggctgctgagccagtccagctgaattcctgcctggctgctggtgacatcctagccctggtttttggcctcctttttgctgtcaccagcgtcgcgttccttgtgcagatgagaaggcagcacagaaggggaaccaaagggggtgtgagctaccgcccagcagaggtagccgagactggagcctagaggctggatcttggagaatgtgagaagccagccagaggcatctgagggggagccggtaactgtcctgtcctgctcattatgccacttccttttaactgccaagaaattttttaaaataaatatttataat

SEQ ID NO: 517 - DNA, 5869 bp, Homo sapiens
ctcgaggatctcggctcactgcaacctccgcctcccaggttcaagctgttcttctgcctcagcctcccgagtagctgggattacaggcgcctgccaccatgccctgctaatttttgtatttttagtagagatggggtttcaccgtgttggccagactggtctcgaactcctgacctcgtgatccacccgcctcagcctcccaaatgctgggattacagatgtgagccaccgcacccggcctggcagaggatactttttaaggtcaaagacagtagcagaggtggagttcctgggaacagggtcatgaggggaagagggggttcggagggagcgagtagccactggctacctctagaaagggaaggctttggtgcaacatcgttcccctgcagttttactcatctttgcttcctgccctttcatcatccaatcgggcaggcaggacagggcctgagggggcagggatccagtgggtgcctctctagactaaccccagctcaggactcccagagccccttccctgaggccctgctgcccccaagcccagattggggatcccaagcagcacgtaggcagagccagtgaggtccccgttagtcccattgaaagctctaaaaccagcgaaccctcagtccagcctcaggtcaggcatccaggacggcctcagccctcatgggtgagccatctctgcggacactgcacagggcctacgatccatcgctgcctcccgaggatgccagccaggcccccgttgagataactgcttccctgctggacaaggctgggaccagccatctcggtgacagttccagaacccctggcctgggctgctgggttcaatggaaaaaggctgtgactagagtcagggggatggtctcagtgacctcaaggataaggccagatccttgcactgtcagtgacccaaagcaacaggtgtccagagcagcagtgtggcgccttcacgcccccacacatcagcccaactcacccaggacagggactgtagcctcagcactcaacccatgtgccctgtgtggggtctcttcccactgcactcacaggagaggaagggtccctcaggggtccactggggtcccctcctgcaaatggggcaaggagaggggcaaggggctgtctcaaggcccctggagcacatgcaggtcctggactggggctcctgggagggccatgattctgggctccatgagttcagagcagacgccttgtttttccttgtccactgtcagccaccccacccttccctgacccttaaaagaaccaggaaacagcacatgatctgttggaaggaggcattcattctttcctttctgtgggtgtggggaggggaccacagggcacataccccaccctgggatccagctgagcaggggggtcagagatgacagctcttccggctcacaggccaccggcccacatacagggcaatcagaagaaagaaacagcacaaggaaggcacagagggagtcgttgtccctgccagaggtgcagcactccgggaatgtccctcactctccccgtccctctgtcttgcccaatcctgaccaggtgcagaaatcttgccaagtgtttccgcaggagttgctggcaattgcctcacattcctggccttggcaaagaatgaatcaacccaccctagatcccataaatagggccacccaggtgagcctctcactcgccacctcctcttccacccctgccaggcccagcagccaccacagcgcctgcttcctcggccctgaaatcatgcccctaggtctcctgtggctgggcctagccctgttgggggctctgcatgcccaggcccaggactccacctcagacctgatcccagccccacctctgagcaaggtccctctgcagcagaacttccaggacaaccaagtaaggggccaagaggggcacctgcaggcagggcctggggaagagtgggagcagaggggaggagaggtgaagagactcaggaagagcgttgggcaggacttaggagtccagggtccaggtttcagctcactctgtgccaccagggtcccctggtggaaaccatgccccttccccccatccccaccccctctcagcctgaacagactcccccaggtccacatcccctctcccataacccccattgtccaaagaaggtgggagcacttttagtccccctgcacagatgaggaaactgaggctcaggaaggcccaccagccacatgcctcctccagtgaggaggtcaccctcctccctgccagactcagaaccgcctcttcccccaggactcccttctggactgatggcctcctgctcctgccccttcaccagtgcaggcccagcctgggccctgctgcccagctagaggggctcatggttccaagctgggcggcccagaggtgccacagggacagagctggaggggtggctcctagggccattcctgggttgtgcctcttatcagtcccttgcagttccaggggaagtggtatgtggtaggcctggcagggaatgcaattctcagagaagacaaagacccgcaaaagatgtatgccaccatctatgagctgaaagaagacaagagctacaatgtcacctccgtcctgtttaggtgagggccgacatctcctgggggtgtgagagtcagactgacgtcacaggcaagggatggccaaagctgagggatcctgtcgttcacctcgctgttctgcccggaattcatctgtgttcatccttcctctgttccttagagcaacgtttatagcacatttccatgcagacacacagacagtggtggggatggacatgcacagtcgttagaaaacaagacggagagaggaggggtgcctgggagcgggaggaggggacactggatccagcctggaaccccacccagtgccttcatggaaggcttccagggaggtggccttaaaagagccaacctgcttcaaaaggaaatgtggggtgttcccggcaggggctggagtcagagagagcccccccttcaggaaggagcaagccatcgcagggtcaccctgagcagagctgctgagcagcctggaggggcaggtggccacgctagcacctagcacggtcctcaggccccgccccagcggatctgctgcggagtggcttagagcagggctcttgggccgcagggtggggagacttggtggggtgcagcctagggggtcgggagaccagcgaaagtgaagcggggccgtcacaggtgtgagagaacaggcgcagggtgaagaggcagggagccagggatcagccgcccccagtgggtttctgactctggcagctgagtggattgggattggggcatttgtggagcaaggagcagaatacagacaggttggggagctcagccctggggtgccaggggatgggaagtgggaggactcaaggatggggtcaggtttgacccgagagctaggggaacggctggcatggagcagactggaagtaccgaggtggatccccgggagagggtataggaagggaagcagcaagctgagtgcaggggagaaatgcagggtttcctgtgtgttgggtggcggcgggggtgaaagccacccagggaggcagccaaaggaaagaaggacatcgggtgctggagggtctgagtggggtccaggggccccaggcaggccaggagggacagcctggtgtcagctcagggagaaggcccaggcccatctcggctgggtggggtagggcccctccaggtagtgggggatgagctgtcacgggttgggccggactgagagcaacagaaccctgctgctgccctggccccaccttgtccagcacaggaggcccaagcctgggttgtctcccctctcacccacccatctctccctcccaaggaaaaagaagtgtgactactggatcaggacttttgttccaggttgccagcccggcgagttcacgctgggcaacattaagagtgagtcttgagtgaggtggggcactgagttggggctccggggagctgggtaggggcacagaccttcctgcccctccacacagatgtgttgtatggggagaagcccacgttgatgggctggggagggaggggacagctccctcctcccatccagggcagggctgacccctcaccgtccacgcctgcaggttaccctggattaacgagttacctcgtccgagtggtgagcaccaactacaaccagcatgctatggtgttcttcaagaaagtttctcaaaacagggagtacttcaagatcaccctctacggtgggtcctctcccatcccctcggggactggctcctgatcacacttagtgggaggggaggccggtcccccatgaggaagggatctgaggcctcatctactcattcaacgatatttatgtggtgtctgccggccactcactggccatcttggtcacagggagaaccaaggagctgacttcggaactaaaggagaacttcatccgcttctccaaatatctgggcctccctgaaaaccacatcgtcttccctgtcccaatcggtaatggccagtctggatgaggggacggggacatggggactgttcaggcaggatgcttccctaccagggatcagggagaggagggactccgtcctcagcttcagtcactggagcagtggatggtccaggagctccttggaagccactctgggcccaggaagactgtgccccaccccagggtctatgggactcccagggacccaggccgcaagtgctctttcctggcagtttagcccgggtctgcccagacaaggatttcaggcccaggcctgagtatccatttctcagtctcactggcctgacacctctggccaccctcccaggcccccttgttctgggccatctcccccgaccctcccaggcctcgtcaccctgggttttgctgtcctggctgtcctctctcccctggggacttgctcaccactgacttgggagctgtccttgactccagggagcctggcttgggcaggaggctccagccaggccattcagagagccactggcctcccccaggctgagagactgcctggactggtaaacaggcaggagacctgggtgcccgaggagcctgggagctgggcctcactcagggcagcccctccccaggcctttctcccacatcccctgccctgccatccacccctctgttgccccatctctgaaaggaacccccatatcttctgcagctgggccaggtggggcaggggctgcccaggggcagtgcagaggacctggcagtcagggatcacacacacacactcatacacgcacacacacacacagctgcctgttctgacggactttctccctaacagaccagtgtatcgacggctgagtgcacagtgagtgtggctgggcggctgcgagggggcttgtgggaggccagggtgcagtgggctgggggtcttgggcctgcctttgctcatccccctgccccccagcactgctgctgtctttattctgctgtccccatctcgggtgcctcccatttccccacccatcaccctcatatccacctctgtccagggtgccgccagctgccgcaccagcccgaacaccattgagggagctgggagaccctccccacagtgccacccatgcagctgctccccaggccaccccgctgatggagccccaccttgtctgctaaataaacatgtgccctcaggcctctgagtctacactgtttgacccctgggccttcgaggaaggggaggggcgggaggctcccactggcatcactctcagggtctgcacccccaggatggagcctagcgaacccagcctgggtgttagggctgcagagtgaagacacaagcccctggtcatcaccagcagctttgtgg

SEQ ID NO: 518 - DNA, 1973 bp, Homo sapiens
ggatccggcaacgaaggtaccatggcgggacgtggcgccatggtgctgttgcacgtgctgtttgagcacgcggtcggctacgcgctcgtggcgctgaaggaagtggaggagatcagtctgctgcagccgcaggtggaggagtccgtgctcaacctgggcaaattccacagcatcgttcgtctggtggccttttgtccctttgcctcatcccaggttgccttggaaaatgccaacgccgtgtctgaaggggttgttcatgaggacctccgcctgctcttggagacccacctgccgtccaaaaagaagaaagtactcttgggagttggggatcccaagattggtgccgcaatacaggaggagttagggtacaactgccagactggaggagtcatagctgagatcctgcgaggagttcgtctgcacttccacaatctggtgaagggtctgaccgatctgtcagcttgtaaagcacagctggggctgggacacagctattcccgtgccaaagttaagtttaatgtgaaccgggtggacaatatgatcatccagtccattagcctcctggaccagctggataaggacatcaataccttctctatgcgtgtcagggagtggtacgggtatcactttccggagctggtgaagatcatcaacgacaatgccacatactgccgtcttgcccagtttattggaaaccgaagggaactgaatgaggacaagctggagaagctggaggagctgacaatggatggggccaaggctaaggctattctggatgcctcacggtcctccatgggcatggacatatctgccattgacttgataaacatcgagagcttctccagtcgtgtggtgtctttatctgaataccgccagagcctacacacttacctgcgctccaagatgagccaagtagcccccagcctgtcagccctaattggggaagcggtaggtgcacgtctcatcgcacatgctggcagcctcaccaacctggccaagtatccagcatccacagtgcagatccttggggctgaaaaggccctgttcagagccctgaagacaaggggtaacactccaaaatatggactcattttccactccaccttcattggccgagcagctgccaagaacaaaggccgcatctcccgatacctggcaaacaaatgcagtattgcctcacgaatcgattgcttctctgaggtgcccacgagtgtattcggggagaagcttcgagaacaagttgaagagcgactgtccttctatgagactggagagataccacgaaagaatctggatgtcatgaaggaagcaatggttcaggcagaggcagaggaagcggctgctgagattactaggaagctggagaaacaggagaagaaacgcttaaagaaggaaaagaaacggctggctgcacttgccctcgcgtcttcagaaaacagcagtagtactccagaggagtgtgaggagacgagtgaaaaacccaaaaagaagaaaaagcaaaagccccaggaggttcctcaggagaatggaatggaagacccatctatctctttctccaaacccaagaaaaagaaatctttttccaaggaggagttgatgagtagcgatcttgaagagaccgctggcagcaccagtattcccaagaggaagaagtctacacccaaggaggaaacagttaatgaccctgaggaggcaggccacagaagtcggtccaagaaaaagaggaaattctccaaagaggagccggtcagcagtgggcctgaagaggcggttggcaagagcagctccaagaagaagaaaaagttccataaagcatcccaggaagattagaatgcaaatggacattctctgggaggtggggcataccatagcccaaggtgacatttcccaccctgtgcccgtgttcccaataaaaacaaattcacaagaaaaaaaaaaaaaaaaaaaaaattcctgaggccgcaagggaattc

SEQ ID NO: 519 - DNA, 273 bp, Homo sapiens
actgtgtcatgtcaggttagatctgaatctctaggagaatagcttttttgatctgtttgctcctttgagtctcccttttactttacaactagaaaaccaatcgcatacttcacttctatcgcttccagatatggcatatttttcttaggctaccgttgaaatttagcataatatttctcccttacctttacgtccttttaaaaaaataggactatagtaagtcctccgtgtcggtggcatgtttttggaaactgactttaaagaaaacataca

SEQ ID NO: 520 - DNA, 359 bp, Homo sapiens
  misc_feature (1)...(359): n=a,t,g or c
cctttaccaaaaatttaaacaataatcccaataatggccagttggcaaaattagggcaattcagtttctgcttacatcgttgaacaagacatgaaattgactaccttaaaagttacagcttccacagatgtgattaaaactcaaatgtattttcagaaaagaaaaatcagtaatctaataatacaacaatcatcacgcctcacaggtgtggctacagaaagccatcctgtttcttcccttttcagactgcatgacagaactcttacaatgcagctgtctgaacgtgcatgccatgcagcnctgtgcattttnttcccacgccagaaacaccaacgttagcagtgagaaacagcctcttg

SEQ ID NO: 521 - DNA, 6728 bp, Homo sapiens
agcagacgggagtttctcctcggggtcggagcaggaggcacgcggagtgtgaggccacgcatgagcggacgctaaccccctccccagccacaaagagtctacatgtctagggtctagacatgttcagctttgtggacctccggctcctgctcctcttagcggccaccgccctcctgacgcacggccaagaggaaggccaagtcgagggccaagacgaagacatcccaccaatcacctgcgtacagaacggcctcaggtaccatgaccgagacgtgtggaaacccgagccctgccggatctgcgtctgcgacaacggcaaggtgttgtgcgatgacgtgatctgtgacgagaccaagaactgccccggcgccgaagtccccgagggcgagtgctgtcccgtctgccccgacggctcagagtcacccaccgaccaagaaaccaccggcgtcgagggacccaagggagacactggcccccgaggcccaaggggacccgcaggcccccctggccgagatggcatccctggacagcctggacttcccggaccccccggaccccccggacctcccggaccccctggcctcggaggaaactttgctccccagctgtcttatggctatgatgagaaatcaaccggaggaatttccgtgcctggccccatgggtccctctggtcctcgtggtctccctggcccccctggtgcacctggtccccaaggcttccaaggtccccctggtgagcctggcgagcctggagcttcaggtcccatgggtccccgaggtcccccaggtccccctggaaagaatggagatgatggggaagctggaaaacctggtcgtcctggtgagcgtgggcctcctgggcctcagggtgctcgaggattgcccggaacagctggcctccctggaatgaagggacacagaggtttcagtggtttggatggtgccaagggagatgctggtcctgctggtcctaagggtgagcctggcagccctggtgaaaatggagctcctggtcagatgggcccccgtggcctgcctggtgagagaggtcgccctggagcccctggccctgctggtgctcgtggaaatgatggtgctactggtgctgccgggccccctggtcccaccggccccgctggtcctcctggcttccctggtgctgttggtgctaagggtgaagctggtccccaagggccccgaggctctgaaggtccccagggtgtgcgtggtgagcctggcccccctggccctgctggtgctgctggccctgctggaaaccctggtgctgatggacagcctggtgctaaaggtgccaatggtgctcctggtattgctggtgctcctggcttccctggtgcccgaggcccctctggaccccagggccccggcggccctcctggtcccaagggtaacagcggtgaacctggtgctcctggcagcaaaggagacactggtgctaagggagagcctggccctgttggtgttcaaggaccccctggccctgctggagaggaaggaaagcgaggagctcgaggtgaacccggacccactggcctgcccggaccccctggcgagcgtggtggacctggtagccgtggtttccctggcgcagatggtgttgctggtcccaagggtcccgctggtgaacgtggttctcctggccccgctggccccaaaggatctcctggtgaagctggtcgtcccggtgaagctggtctgcctggtgccaagggtctgactggaagccctggcagccctggtcctgatggcaaaactggcccccctggtcccgccggtcaagatggtcgccccggacccccaggcccacctggtgcccgtggtcaggctggtgtgatgggattccctggacctaaaggtgctgctggagagcccggcaaggctggagagcgaggtgttcccggaccccctggcgctgtcggtcctgctggcaaagatggagaggctggagctcagggaccccctggccctgctggtcccgctggcgagagaggtgaacaaggccctgctggctcccccggattccagggtctccctggtcctgctggtcctccaggtgaagcaggcaaacctggtgaacagggtgttcctggagaccttggcgcccctggcccctctggagcaagaggcgagagaggtttccctggcgagcgtggtgtgcaaggtccccctggtcctgctggaccccgaggggccaacggtgctcccggcaacgatggtgctaagggtgatgctggtgcccctggagctcccggtagccagggcgcccctggccttcagggaatgcctggtgaacgtggtgcagctggtcttccagggcctaagggtgacagaggtgatgctggtcccaaaggtgctgatggctctcctggcaaagatggcgtccgtggtctgaccggccccattggtcctcctggccctgctggtgcccctggtgacaagggtgaaagtggtcccagcggccctgctggtcccactggagctcgtggtgcccccggagaccgtggtgagcctggtccccccggccctgctggctttgctggcccccctggtgctgacggccaacctggtgctaaaggcgaacctggtgatgctggtgccaaaggcgatgctggtccccctgggcctgccggacccgctggaccccctggccccattggtaatgttggtgctcctggagccaaaggtgctcgcggcagcgctggtccccctggtgctactggtttccctggtgctgctggccgagtcggtcctcctggcccctctggaaatgctggaccccctggccctcctggtcctgctggcaaagaaggcggcaaaggtccccgtggtgagactggccctgctggacgtcctggtgaagttggtccccctggtccccctggccctgctggcgagaaaggatcccctggtgctgatggtcctgctggtgctcctggtactcccgggcctcaaggtattgctggacagcgtggtgtggtcggcctgcctggtcagagaggagagagaggcttccctggtcttcctggcccctctggtgaacctggcaaacaaggtccctctggagcaagtggtgaacgtggtccccccggtcccatgggcccccctggattggctggaccccctggtgaatctggacgtgagggggctcctgctgccgaaggttcccctggacgagacggttctcctggcgccaagggtgaccgtggtgagaccggccccgctggaccccctggtgctcctggtgctcctggtgcccctggccccgttggccctgctggcaagagtggtgatcgtggtgagactggtcctgctggtcccgccggtcccgtcggccccgtcggcgcccgtggccccgccggaccccaaggcccccgtggtgacaagggtgagacaggcgaacagggcgacagaggcataaagggtcaccgtggcttctctggcctccagggtccccctggccctcctggctctcctggtgaacaaggtccctctggagcctctggtcctgctggtccccgaggtccccctggctctgctggtgctcctggcaaagatggactcaacggtctccctggccccattgggccccctggtcctcgcggtcgcactggtgatgctggtcctgttggtccccccggccctcctggacctcctggtccccctggtcctcccagcgctggtttcgacttcagcttcctgccccagccacctcaagagaaggctcacgatggtggccgctactaccgggctgatgatgccaatgtggttcgtgaccgtgacctcgaggtggacaccaccctcaagagcctgagccagcagatcgagaacatccggagcccagagggaagccgcaagaaccccgcccgcacctgccgtgacctcaagatgtgccactctgactggaagagtggagagtactggattgaccccaaccaaggctgcaacctggatgccatcaaagtcttctgcaacatggagactggtgagacctgcgtgtaccccactcagcccagtgtggcccagaagaactggtacatcagcaagaaccccaaggacaagaggcatgtctggttcggcgagagcatgaccgatggattccagttcgagtatggcggccagggctccgaccctgccgatgtggccatccagctgaccttcctgcgcctgatgtccaccgaggcctcccagaacatcacctaccactgcaagaacagcgtggcctacatggaccagcagactggcaacctcaagaaggccctgctcctcaagggctccaacgagatcgagatccgcgccgagggcaacagccgcttcacctacagcgtcactgtcgatggctgcacgagtcacaccggagcctggggcaagacagtgattgaatacaaaaccaccaagtcctcccgcctgcccatcatcgatgtggcccccttggacgttggtgccccagaccaggaattcggcttcgacgttggccctgtctgcttcctgtaaactccctccatcccaacctggctccctcccacccaaccaactttccccccaacccggaaacagacaagcaacccaaactgaacccccccaaaagccaaaaaatgggagacaatttcacatggactttggaaaatatttttttcctttgcattcatctctcaaacttagtttttatctttgaccaaccgaacatgaccaaaaaccaaaagtgcattcaaccttaccaaaaaaaaaaaaaaaaaaaaaagaataaataaataagtttttaaaaaaggaagcttggtccacttgcttgaagacccatgcgggggtaagtccctttctgcccgttgggttatgaaaccccaatgctgccctttctgctcctttctccacaccccccttggcctcccctccactccttcccaaatctgtctccccagaagacacaggaaacaatgtattgtctgcccagcaatcaaaggcaatgctcaaacacccaagtggcccccaccctcagcccgctcctgcccgcccagcacccccaggccctggggacctggggttctcagactgccaaagaagccttgccatctggcgctcccatggctcttgcaacatctccccttcgtttttgagggggtcatgccgggggagccaccagcccctcactgggttcggaggagagtcaggaagggccacgacaaagcagaaacatcggatttggggaacgcgtgtcatcccttgtgccgcaggctgggcgggagagactgttctgttctgttccttgtgtaactgtgttgctgaaagactacctcgttcttgtcttgatgtgtcaccggggcaactgcctgggggcggggatgggggcagggtggaagcggctccccatttttataccaaaggtgctacatctatgtgatgggtggggtggggagggaatcactggtgctatagaaattgagatgcccccccaggccagcaaatgttcctttttgttcaaagtctatttttattccttgatattttttctttctttttttttttttttgtggatggggacttgtgaatttttctaaaggtgctatttaacatgggaggagagcgtgtgcgctccagcccagcccgctgctcactttccaccctctctccacctgcctctggcttctcaggcctctgctctccgacctctctcctctgaaaccctcctccacagctgcagcccatcctcccggctccctcctagtctgtcctgcgtcctctgtccccgggtttcagagacaacttcccaaagcacaaagcagtttttccctaggggtgggaggaagcaaaagactctgtacctattttgtatgtgtataataatttgagatgtttttaattattttgattgctggaataaagcatgtggaaatgacccaaacataatccgcagtggcctcctaatttccttctttggagttgggggaggggtagacatggggaaggggccttggggtgatgggcttgccttccattcctgccctttccctccccactattctcttctagatccctccataaccccactcccctttctctcacccttcttataccgcaaacctttctacttcctctttcattttctattcttgcaatttccttgcaccttttccaaatcctcttctcccctgcaataccatacaggcaatccacgtgcacaacacacacacacactcttcacatctggggttgtccaaacctcatacccactccccttcaagcccatccactctccaccccctggatgccctgcacttggtggcggtgggatgctcatggatactgggagggtgaggggagtggaacccgtgaggaggacctgggggcctctccttgaactgacatgaagggtcatctggcctctgctcccttctcacccacgctgacctcctgccgaaggagcaacgcaacaggagaggggtctgctgagcctggcgagggtctgggagggaccaggaggaaggcgtgctccctgctcgctgtcctggccctgggggagtgagggagacagacacctgggagagctgtggggaaggcactcgcaccgtgctcttgggaaggaaggagacctggccctgctcaccacggactgggtgcctcgacctcctgaatccccagaacacaacccccctgggctggggtggtctggggaaccatcgtgcccccgcctcccgcctactcctttttaagctt

SEQ ID NO: 522 - DNA, 5086 bp, Homo sapiens
  misc_feature (1)...(5086): n=a,t,g or c
agcaccacggcagcaggaggtttcggnctaagttggaggtactggnccacgactgcatgcccgcgcccgccaggtgatacctccgccggtgacccaggggctctgcgacacaaggagtctgcatgtctaagtgctagacatgctcagctttgtggatacgcggactttgttgctgcttgcagtaaccttatgcctagcaacatgccaatctttacaagaggaaactgtaagaaagggcccagccggagatagaggaccacgtggagaaaggggtccaccaggccccccaggcagagatggtgaagatggtcccacaggccctcctggtccacctggtcctcctggcccccctggtctcggtgggaactttgctgctcagtatgatggaaaaggagttggacttggccctggaccaatgggcttaatgggacctagaggcccacctggtgcagctggagccccaggccctcaaggtttccaaggacctgctggtgagcctggtgaacctggtcaaactggtcctgcaggtgctcgtggtccagctggccctcctggcaaggctggtgaagatggtcaccctggaaaacccggacgacctggtgagagaggagttgttggaccacagggtgctcgtggtttccctggaactcctggacttcctggcttcaaaggcattaggggacacaatggtctggatggattgaagggacagcccggtgctcctggtgtgaagggtgaacctggtgcccctggtgaaaatggaactccaggtcaaacaggagcccgtgggcttcctggtgagagaggacgtgttggtgcccctggcccagctggtgcccgtggcagtgatggaagtgtgggtcccgtgggtcctgctggtcccattgggtctgctggccctccaggcttcccaggtgcccctggccccaagggtgaaattggagctgttggtaacgctggtcctgctggtcccgccggtccccgtggtgaagtgggtcttccaggcctctccggccccgttggacctcctggtaatcctggagcaaacggccttactggtgccaagggtgctgctggccttcccggcgttgctggggctcccggcctccctggaccccgcggtattcctggccctgttggtgctgccggtgctactggtgccagaggacttgttggtgagcctggtccagctggctccaaaggagagagcggtaacaagggtgagcccggctctgctgggccccaaggtcctcctggtcccagtggtgaagaaggaaagagaggccctaatggggaagctggatctgccggccctccaggacctcctgggctgagaggtagtcctggttctcgtggtcttcctggagctgatggcagagctggcgtcatgggccctcctggtagtcgtggtgcaagtggccctgctggagtccgaggacctaatggagatgctggtcgccctggggagcctggtctcatgggacccagaggtcttcctggttcccctggaaatatcggccccgctggaaaagaaggtcctgtcggcctccctggcatcgacggcaggcctggcccaattggcccagctggagcaagaggagagcctggcaacattggattccctggacccaaaggccccactggtgatcctggcaaaaacggtgataaaggtcatgctggtcttgctggtgctcggggtgctccaggtcctgatggaaacaatggtgctcagggacctcctggaccacagggtgttcaaggtggaaaaggtgaacagggtcccgctggtcctccaggcttccagggtctgcctggcccctcaggtcccgctggtgaagttggcaaaccaggagaaaggggtctccatggtgagtttggtctccctggtcctgctggtccaagaggggaacgcggtcccccaggtgagagtggtgctgccggtcctactggtcctattggaagccgaggtccttctggacccccagggcctgatggaaacaagggtgaacctggtgtggttggtgctgtgggcactgctggtccatctggtcctagtggactcccaggagagaggggtgctgctggcatacctggaggcaagggagaaaagggtgaacctggtctcagaggtgaaattggtaaccctggcagagatggtgctcgtggtgctcatggtgctgtaggtgcccctggtcctgctggagccacaggtgaccggggcgaagctggggctgctggtcctgctggtcctgctggtcctcggggaagccctggtgaacgtggcgaggtcggtcctgctggccccaacggatttgctggtccggctggtgctgctggtcaaccgggtgctaaaggagaaagaggagccaaagggcctaagggtgaaaacggtgttgttggtcccacaggccccgttggagctgctggcccagctggtccaaatggtccccccggtcctgctggaagtcgtggtgatggaggcccccctggtatgactggtttccctggtgctgctggacggactggtcccccaggaccctctggtatttctggccctcctggtccccctggtcctgctgggaaagaagggcttcgtggtcctcgtggtgaccaaggtccagttggccgaactggagaagtaggtgcagttggtccccctggcttcgctggtgagaagggtccctctggagaggctggtactgctggacctcctggcactccaggtcctcagggtcttcttggtgctcctggtattctgggtctccctggctcgagaggtgaacgtggtctacctggtgttgctggtgctgtgggtgaacctggtcctcttggcattgccggccctcctggggcccgtggtcctcctggtgctgtgggtagtcctggagtcaacggtgctcctggtgaagctggtcgtgatggcaaccctgggaacgatggtcccccaggtcgcgatggtcaacccggacacaagggagagcgcggttaccctggcaatattggtcccgttggtgctgcaggtgcacctggtcctcatggccccgtgggtcctgctggcaaacatggaaaccgtggtgaaactggtccttctggtcctgttggtcctgctggtgctgttggcccaagaggtcctagtggcccacaaggcattcgtggcgataagggagagcccggtgaaaaggggcccagaggtcttcctggcttaaagggacacaatggattgcaaggtctgcctggtatcgctggtcaccatggtgatcaaggtgctcctggctccgtgggtcctgctggtcctaggggccctgctggtccttctggccctgctggaaaagatggtcgcactggacatcctggtacggttggacctgctggcattcgaggccctcagggtcaccaaggccctgctggcccccctggtccccctggccctcctggacctccaggtgtaagcggtggtggttatgactttggttacgatggagacttctacagggctgaccagcctcgctcagcaccttctctcagacccaaggactatgaagttgatgctactctgaagtctctcaacaaccagattgagacccttcttactcctgaaggctctagaaagaacccagctcgcacatgccgtgacttgagactcagccacccagagtggagcagtggttactactggattgaccctaaccaaggatgcactatggatgctatcaaagtatactgtgatttctctactggcgaaacctgtatccgggcccaacctgaaaacatcccagccaagaactggtataggagctccaaggacaagaaacacgtctggctaggagaaactatcaatgctggcagccagtttgaatataatgtagaaggagtgacttccaaggaaatggctacccaacttgccttcatgcgcctgctggccaactatgcctctcagaacatcacctaccactgcaagaacagcattgcatacatggatgaggagactggcaacctgaaaaaggctgtcattctacagggctctaatgatgttgaacttgttgctgagggcaacagcaggttcacttacactgttcttgtagatggctgctctaaaaagacaaatgaatggggaaagacaatcattgaatacaaaacaaataagccatcacgcctgcccttccttgatattgcacctttggacatcggtggtgctgaccatgaattctttgtggacattggcccagtctgtttcaaataaatgaactcaatctaaattaaaaaagaaagaaatttgaaaaaactttctctttgccatttcttcttcttcttttttaactgaaagctgaatccttccatttcttctgcacatctacttgcttaaattgtgggcaaaagagaaaaagaaggattgatcagagcattgtgcaatacagtttcattaactccttcccccgctcccccaaaaatttgaatttttttttcaacactcttacacctgttatggaaaatgtcaacctttgtaagaaaaccaaaataaaaattgaaaaataaaaaccataaacatttgcaccacttgtggcttttgaatatcttccacagagggaagtttaaaacccaaacttccaaaggtttaaactacctcaaaacactttcccatgagtgtgatccacattgttaggtgctgacctagacagagatgaactgaggtccttgttttgttttgttcataatacaaaggtgctaattaatagtatttcagatacttgaagaatgttgatggtgctagaagaatttgagaagaaatactcctgtattgagttgtatcgtgtggtgtattttttaaaaaatttgatttagcattcatattttccatcttattcccaattaaaagtatgcagattatttgcccaaagttgtcctcttcttcagattcagcatttgttctttgccagtctcattttcatcttcttccatggttccacagaagctttgtttcttgggcaagcagaaaaattaaattgtacctattttgtatatgtgagatgtttaaataaattgtgaaaaaaatgaaataaagcatgtttggttttccaaaagaacatat

SEQ ID NO: 523 - DNA, 434 bp, Homo sapiens
  misc_feature (1)...(434): n=a,t,g or c
agggaagatagtaaaattcatttaataggcatgttccatataaccattttgttacaaattttgcattttccacatgaaaaaaaatcacagtaggcacatactagaagcaaaatatgtcagacaaaaatatcctaaagatgtttctgttatcaaacttttacaatttttccaagacgtttttgaggtttgggaaaaagtctggggnatttttggcaaaaaacaaacacactctatccatgtgagttttgactattgttctttctcaccaaaaatgtccataattttctacaaattccatgaagttttaaatcaatcatgtttgatttacatttaccaagaatgatttgcccatcaccataaaaattganttaaaaatacatcaggctaaataaatccaaaagngaacagtgaattttgttgggtttacagacagt

SEQ ID NO: 524 - DNA, 403 bp, Homo sapiens
caaataattactgttttatattgggacagtacatttcagatttcaaccaaaagacaaaaatgcagtttaactcaaaggcacaacaattgaaacacagaaaataatggcatctcttggatgccttatttctaaattaaacaaagaagtacacaaattttgttcccttccctcccccagtgcaagcccacaagctttttccaaagtcttgagcttttgatgctgtcccgcattgtggacttgtgaggcgcttggatgtagcaatgaaacaaaatgcttgagaggtctagtgaatggcattcaaaagggacctcaaagtgcagacatatctttttcaaattatgttacaggctgaactggctctttgaacactatcactctgcttaaatccaggaagcaggcttta

SEQ ID NO: 525 - DNA, 453 bp, Homo sapiens
  misc_feature (1)...(453): n=a,t,g or c
ttttttatatacacagcatttttattaaatatactctgtgagaaaaagaacaccctaaagtgccagatttcatgtaaatccaataacttagtaaatacaatggtgaaaaaaaatcngagggaaacataatttaaataatcttataaaagagcaagaacatatcttaatcttaagaaaacaatcatcaaaatataaaagggaaagaaatctcttttgtagaagaatatatttcaaattccacctgttgatcatttcatttaaaaaattctattctaaacacatgggcagtctctcttaccaatatatatatttaaatcaatgggtagaaagggaatttagactactcattcacactgagataaagtgacatttttgttgcacaacagtattgctcactgggcactaacagtgggaagatggagaaagtagatttctgggattcaattggttagc

SEQ ID NO: 526 - DNA, 264 bp, Homo sapiens
ttttttttttttttttttttaaaatgggaaggtttattaaggtttttcctcaagaggaacagccaatctcttgcttcttgagagaagcaattagtgggaaatgtatgtcacaccttgggcccagaaccacaggaggccgcttctcagcatgcccaacgaacatacatcatccccaattcccatttaaagctcattaatgtctacaaaacagaatccacgttgccttcccagaaaacagaactaggaacccagtcaaagcctcca

SEQ ID NO: 527 - DNA, 484 bp, Homo sapiens
  misc_feature (1)...(484): n=a,t,g or c
atttaaaaaatcattttacttattaaaactttctcatttcccaaggcacttcagtagctttcacaaaaacatgtttgttcttttttaaccaggtgaggcatatgctttaggagtaccatggtaacataatcagcaaagagaagacaattacactgaacacaaaatatcacccaataaagttacaggactaaagtgagctactctgaaagactatgaacacaatttaaatttcttttttgtaatatcctcccatgactaagtatcaagaaaggaacacacacaatgacactgtttttggcacttagagaagtgctagaggctagggctggtaaggccttgcaccagtggcagctgcagacaattgccagagtgattctgttttaaaaaaaaaaaaaaaagacacaaaccaggaggctaaggaaccagcctttcccaagtgcattctgaagggccaatnaccaggagaanagggtncaccaccatt

SEQ ID NO: 528 - DNA, 456 bp, Homo sapiens
  misc_feature (1)...(456): n=a,t,g or c
tggcggtggtgaaatcaacgtgcttctttattttttaaactagataggctcattctactgtcttctccagggctcttctatgaaacagttacaaacctacggccaggccaggcagtggctcacacctgtaatcccagcactttggaatgctggggcaggaggatcacttgaggtcaggagctcgagaccagcctggagtatagggagacccccgcccccccccgccatctctacataaaatttaaacattagccaggtttggtggcctgtgcctgtagtcccagctactcaggaggctgagatgggaggatccgcttgagcctgggagttcaaagctgcagtgagccatgattgcaacattgcacttccagcctgggcgacggagcgaagaccctgtctcaaaaaataaaaaccaaaacctactgncagtttccccagggcttcatgcctcagcgn

SEQ ID NO: 529 - DNA, 337 bp, Homo sapiens
  misc_feature (1)...(337): n=a,t,g or c
tttttttttttttcaaaaccagcaaaaataaaatttaattgggctcaagtctgggcagtttgtccttcctcaggaccagccgtcagcagtccctgacgaaagcaccccattctctccacagacagctggttccagaaggaccctctgaggctggtcttccgggtaggatgtgctgtgggagggttctgtttccgaggaggagaggcgcgacacagcgtgcaaggacctgcagcaccttccacgcagcaccccctgctcctcctcctcagcccctgccgggctctgactcctaagtcaggcaggagcttcttcaggcccctgggntgaggaagagcca

SEQ ID NO: 530 - DNA, 364 bp, Homo sapiens
  misc_feature (1)...(364): n=a,t,g or c
ctatgtcagagctagtgatttcaaaaggtttcacaattccccaagacaaaagtgattttcgttcattataataaggttaagtgatatgtgattcatagcaattttgatgtgaagaagggaaggacatcattgacttaataatagtatcagtcggtgcaacagttggcaacatgtgccttcacactttaccataaagagacgggtttgagggtttgccttctaaagtctgcaacttcaagaaaaaaaatcgacactgtggattgactttcccggtcactatataaagcaaataaacttaaaacactttgtaaccatgtatttactctgccaggtgcctatattccaatanaatgttcatccttga

SEQ ID NO: 531 - DNA, 280 bp, Homo sapiens
tttagctttgaaatgcatttattttctgattattggaattcatccttcatgaaatttttagagtagtgttttaaattaagctccagagtgtaactgcaaccaaatagcaatacatacaagtggttttccattcaaatttacaaaagcattatttattagtaataaaaatatagaaggaattcagttttccttttatccccaattttttgcttttaaaagaccatttactaacatcctactgtagatatttcgagagacagatgaaaataataataataaa

SEQ ID NO: 532 - DNA, 402 bp, Homo sapiens
ctgtgagactgtcctttattgtgtatacaggttccagcgtcagggctctcccacggccccctccccagtcctcccccaagggcccagagtggtgggagtgagaggccaccctaaggcacactgaccagagaggcatggagggaggaggctgacttgccctggggacccctgctaactgagacccacccttcccctccaccctgcttctgtatgtgggagacgaaaccaagagtcactgggggcagcaggcatttcccagggttaaggctgatggaaggtccctatcccagatgggagatgggggcttttcctatgactccccccatcccccagctggaagacgtggggaggggtgcatagccttagagaggtagaatgaggggaaatactcctcagtgccca

SEQ ID NO: 533 - DNA, 413 bp, Homo sapiens
ataggtaaaatttttatttatgaatgtgtggacacatgactttggatccagccagccagtgacataaataaacttgagcaaaagtttcaagctagaggatatatatgtatagaaaattatatatttgtgtgtgtgtgtaaggcctcttggaacagtgccacaaacctggacaccaaccaacagaatactcccgtcctttgaaatttccattaagagcacaatgggggtaattataccaggatgctccaatcgctctttccatcttgtgcactcacatgcccgccaaacatgaaatgttcgccttctcccttccaatgtgatggttgttgaacttatctttagtgtcatttgataagcctttgtgctcacagagagacatcccactgacccagccactgggtcattggtctata

SEQ ID NO: 534 - DNA, 392 bp, Homo sapiens
  misc_feature (1)...(392): n=a,t,g or c
gactacaaccagtgtttattcttgatttgtcaccactcttttcatagtcttgttttcttccacatgttaaatatataataaccaaaactttactaacatacgaatgaagaaaacatgcgcaagtantngcatggcaggtagtgaggaaatctggccagccgactggttcctttaccaaggtttgcagagtaggttgtgtttgaacaccttctgtgggtctgtgtcatttccaagttgaagaatttcagccaaagagcaacatgtcacattgattaaagatggttaatgacacagaaacatttctgttaatactaagggaaaaggctgttcttttatttatttatttttcctgagtcctcacgtttttcttctctgacaaatgtttgaaattc

SEQ ID NO: 535 - DNA, 337 bp, Homo sapiens
  misc_feature (1)...(337): n=a,t,g or c
ttaagaatttccacccacaattttattattactgaaagcatttggaatgaagcaaaggatttaacaatatatataaaaatatacattttttaaaaaatcgcaagtagacaatagatttatggaattatttttctgatcatccagaaaagatagcaatagtaaactgcagttgggtngagaccagccactgngtccatgagacctaagcagccctaacgctgcctgagctctcaagagtagaagaaatgctcgacaaacagaaggaggctgtgggagggcagcaggacagccccaccagaaaaccagagcccaaatgggntggggcagggccaggggc

SEQ ID NO: 536 - DNA, 498 bp, Homo sapiens
gaagcaaggagctaggacccccagtcctgccccccaggagcacaagcagggtcccctcagtcaaggcagtgggatgggcggctgaggaacggggcaggcaaggtcactgctcagtcacgtccacgggggacgagccgtgggttctgctgagtaggtggagctcattgctttctccaagcttggaactgttttgaaagataacacagagggaaagggagagccacctggtacttgtccaccctgcctcctctgttctgaaattccatccccctcagcttaggggaatgcacctttttccctttccttctcacttttgcatgtttttactgatcattcgatatgctaaccgttctcagccctgagccttggagaggagggctgtaacgccttcagtcagtctctggggatgaaactcttaaatgctttgtatattttctcaattagatctcttttcagaagtgtctatagaacaataaaaatcttttacttctgaaaaaa

SEQ ID NO: 537 - DNA, 97 bp, Homo sapiens
  misc_feature (1)...(97): n=a,t,g or c
ttttnttttttttttttaacttttgaattccgtattttttaatggtctatggtctacaaacactcatgtgcaaacacatacacgcagaatagggatc

SEQ ID NO: 538 - DNA, 267 bp, Homo sapiens
  misc_feature (1)...(267): n=a,t,g or c
accgagtatattctgtttattgtttatgatttacacagaaaatgatgggctggggttatagaacaataaaccaaccattacatttagacctgggcttttgaaaaacttgcattccattttaacaattcgtatgtatctaacaaatacataaatccagatcacaaataatcttaagagttaaacaattaagaaacacaaagaataccacatagatctacctttaaatatcagcattcatattataagagataagaaaatgttanaaag

SEQ ID NO: 539 - DNA, 519 bp, Homo sapiens
  misc_feature (1)...(519): n=a,t,g or c
aaccacanaagagtagcagtccattttctggaagngcgcatgatattatgancaatacaaatgcattatttttatcattaatagtntaatcattaattatcncanaagtcaatgcagagagtgaaattantntgaattaaacttcngttcanaatgtacagtattttgcatatgtngactttacttaatngtncattnttgtttccaaagttaangttaaatacctggtgcataggttgttgtcaagcaattactctcattgtcttgtcatacatgctaacattttgctaaatataaatctacaagtatcacagctgcatatatttctgaagtggttagaacagaggaggatgctggaaagttgagttctttaaaatcttcgttcaaaacaagagattttcatctatgtcctcttctttaattccaaagcagtggncccactccttcagggtgatgtgcttatccttnttggggtcacactccntcaaataaacgggttatgccagtgttccatgggcc

SEQ ID NO: 540 - DNA, 359 bp, Homo sapiens
  misc_feature (1)...(359): n=a,t,g or c
gaagcttttatcaactttaattgatataatnatnntnggtatgcantatgtcntgcaacaaatgtggatacaatgacatcanntatcaaagaattttcccacctttccatctttaaatgacttcagctaacttaccccaagagaaaaatctggcattgatctcttggttagcattattaccaatatcaactagcactattaaaatcaaagttgaaatggtacattcatttgccaaaaaaaaaaaaaagaaaaaaaaggcttaaaggcaaagaaggtgaatcaacgtgcaaattagcatctggcccaattgcaaaattcatttcctgggatgtgagggattgaaccatgcacacttggca

SEQ ID NO: 541 - DNA, 328 bp, Homo sapiens
  misc_feature (1)...(328): n=a,t,g or c
tttttttttttgtttaaaatcatttattattatcaggagtgccttttaggtggaccgctctgtatgactctcatgcttcaaaactattttttattcaagtgacttacaatggccctaggaaacaagttctgttattatcccccattttaaaatgatgaaaatggacaaagcaaaagcaagcaacttaaccaataccccatggcctcacagcctttagaatagtcatattatataaatatggcaataacaatgcnctgaaaatgtctccaaaacaaactctacattttaaaaaatgtataacaggaatctaaggaaggggtcttacttc

SEQ ID NO: 542 - DNA, 358 bp, Homo sapiens
tatctgctttttgctgctagtttcaaactgccagtatttttccttttgcttttaaaatagttacaatatttttcatgatagccacagtattgccacagtttattataataaagggtttttatttgatttagcgcattcaaagcttttttctatcacttttgtgttcagaatataacctttgtgtgcgtgtatgttgtgtgtgtgcatgtgtggcgtatatgtgtgttacaggttaatgccttcttggaattgtgttaatgttctcttggtttattatgccatcagaatggtaaatgagaacactacaactgtagtcagctcacaatttttaaataaaggataccacagtgcaaaaaaa

SEQ ID NO: 543 - DNA, 425 bp, Homo sapiens
ttttttttttttaaaagcaagaataatctttattccttggaaacacatttgtaaaaatgctatcaataagatgaaaagattcagaacacatttatttgtatgcagcacatacactgagcatcagaacgtctgctaaaatggaatacacctgtaaacaaatgccttagggagagtttataggtagtcagctccactgtgcaaggtatgcagctgataccttcttgctgaatagatttttgcagtagccaaaaaagatcagattttagtaataaaatatctcaaaggatgtcaaacattttttagagggcctaacatgggcaaaattacaattacatatacaaaaatggcacaagaatcaactgatttcacagaaatactaataaaacatttcagggtctattattaagagaaaaaaatgtttgact

SEQ ID NO: 544 - DNA, 430 bp, Homo sapiens
gaacaaacagcatgcactgtggtatcctttatttaaaaattgtgagctgactacagttgtagtgttctcatttaccattctgatggcataataaaccaagagaacattaacacaattccaagaaggcattaacctgtaacacacatatacgccacacatgcacacacacaacatacacgcacacaaaggttatattctgaacacaaaagtgatagaaaaaagctttgaatgcgctaaatcaaataaaaaccctttattataataaactgtggcaatactgtggctatcatgaaaaatattgtaactattttaaaagcaaaaggaaaaatactggcagtttgaaactagcagcaaaaagcagataaaaatagaatggaagataacataagactaatatcaaaattctaatgttgatactgtgtaggattgc

SEQ ID NO: 545 - DNA, 616 bp, Homo sapiens
  misc_feature (1)...(616): n=a,t,g or c
gatttccatgcactttaatgaggtccagcactcaggaggattagcgcccaccaccagctgcctgggcaggggagggccggagcaggtngcaggcgtcaggcttaggacagggaagggggctcaggatggggaagggtcctcaggacaggggaaggggctcagaagagagcagggggcttaggacaggaaggggcactcaggacggggcagggaaggtgtggggggcagtcgccacctgggtaggaagcagtggtgttttggacaggaggggctggctctccagtgacccaggtggacaccccaggcctgactcacggctttttggggacatagtggtggatccagtccaagtagtaggtgacacgggtgtagatgccaggccggttgggctgggcacagctncgntcccagctgaccacgcccgcctgtagccaggtgccattcaccttgcacaccaggggccctccagagttcgccctggcatgagtccctccggtgttcccggcacacagcatgtcgttcacggatgatgccgacgtcgtctcccgtgtaggcgccaaagtggtatttgcgtcacaaatgtggtttccattatggggaccttcactgcttcagg

SEQ ID NO: 546 - DNA, 428 bp, Homo sapiens
tttttttttttttttttttccgaaaacatcggatttattaggattagctgtagtgtacactgattcctttagctctaaatggatacatatgtgccccgcagacagtatacacgcagggatgtgactgagccacagtgacatagcaaacccaacagctggcttgtgaagccatcgtgatcccaacaaggtctatgttagcaattggtgaaagaagaagagagtgagatgggacccaggtgggcctggaggtgggatcctgtgggttttcagagcacccaccagtgctcccttggtgagcccagcaccacctggaagtggagggaagctgggtcgctgctggaagggagagaggctgactctctacccctcacctctgcaaggaactgaggcctgtagggttgcggctgtcactggctaacaggtctgtt

SEQ ID NO: 547 - DNA, 436 bp, Homo sapiens
aaaattagaaagtggtttatttgcaatttacatggattcctctactttgtgaggtttagtataattgaaatgtattgcaattttcaggaacattacctacaaattgatattaggtggtctacagcttgtaattgatgtgcttcatgataaagatggcagtaatgatgttttaaatattctagtgctcactggatttcatttttgcaggcaatttgcagctcctctgagtaaaacatttatattcaattacagagtctgataaataggattcccgccaccccaccccttctaatcactgcagagtattaataagtgctttcttatggctgatttcttgcagggagcaaagataagattatagccaaatttctttcaaaacctcagcagcatctccttctgggtagccatttagatattttcttccacctctttgact

SEQ ID NO: 548 - DNA, 454 bp, Homo sapiens
  misc_feature (1)...(454): n=a,t,g or c
tatatgggaacatactgtttattcaataagaaattaattttttatcgttggatttgaataaattttcttctcccaagcaatctgattggcagtacaccattgcagcatatactttattattatcatcattattattttccacaacatttaataccaagtttccttctctcacatagaatattacccaatagaagtctccaaaaggggccatagcacattcataacaaagatagaaaagaaaactttcaatgtctgctttccaatatgatgattcaactaaaacaaagctgaatttctcagctatgaaactgaaaaaatgaaaatcagcccatgtgtacatcacggccagccatgatcattaacacctccatgganatgaggggagaaaagagagaaacaactgcttccttcttacccaaacttctaatattagcttcaaattactttaaaaaaa

SEQ ID NO: 549 - DNA, 436 bp, Homo sapiens
tactttagtgttgatcagtttattagtatttttccaaacctgaagaatggtgaaagtttgtggtacagtgtggggaaaacagtaagtgtggctttgggcaagccacttcccttctatggctctcagttttcccatctgcacaatgagggggttggagtgtgtggtctctaaggcactgaatttcagtctgttctccatccatcagtggatatgtgagatgcaatgcaggggtgctggcctgtccctggtaatgagcgaggatatgagcaaagcagtgagtacagcctggaattccagctactcaggaggctgaggtacgagaatcactttgaacttgggaggctgaggtttcagtgagctgagatctggccactgcactccagcctgggcgacagagtgagactctgtctcaaaaaaaggattctacgactatgat

SEQ ID NO: 550 - DNA, 421 bp, Homo sapiens
ctcacatctttttaatcattcatattgacttaatcaggttgacaaaatctcagggttggtctgggatcattcacaaatcagaattactcagagaaattttcacagcagttgcagcagcacaaactctaacgctgatttaaattaataactgttattaatgaacaaacttgaaaaaggaatttcatatagaacattacatttctccctgacactaccgtatcataaaaattaaaaatgatataaacatgttttaaagtcatagtggtagaaccagccacactacagtgcggcattgttagaagttcgctctcaagttgactcagcttagtaaagcaaattgttctctgagatttcagctttggttagtcctctttggctgacatgaacattatggagtgttaactggtggtagcaacacata

SEQ ID NO: 551 - DNA, 427 bp, Homo sapiens
tttaacaagccaaagttgtatttttttaaacaggaaaattatgtcaatataaaacagataaaaagacaaaaatcaaaacacacaacacagaaaagcacaacactcaagaccagtgcaaacccttcccaacccacttcccaggttttaaaaccttgattacagatccccaaggattagactgtatcggagaggtcacagtattgaatcagaaaaagaagacatgttttaaaaggtctgtacacaggtagtggtgtgtggggtgggggatgtacacttcatcactccaacatcaaaaaacatgatgcaaaaaggatttcagcgatgaccacagatttctagaaccctaccacgtatgctagcccccctccccatccacttttaaaagttgcttttaaaaaggataaaaagtgcacagacactttcgtaa

SEQ ID NO: 552 - DNA, 391 bp, Homo sapiens
tttttttttttttcaagtaaaaacttaaaacgtttatttctggtagaaatgataaatactttgcattaaaaatctggaattcaagttttcctcgtacttcatgctccctccctgccccagaaccttacaaaaatatttctgtctagagagggaaagagctggtgcctgctctggaggcaacgtccaggtccgggaaaggcactcgtggtctgtgatctgtctcagtgatgggaggtctccactcgccccacaggcagcctcggggccagagatgagaatatgctgtaatccagtacaggggctgcgtcgtgggtccccaacagctccttctttggggatagtgagcccctgttggggagtaggaagggactgaggggccgtcccctcgtgc

SEQ ID NO: 553 - DNA, 114 bp, Homo sapiens
gacaatactcaaagaatatttattgttgacgcttttttccttatatttaacattttgagataaaggctaaatgagtgtatttgtgtgcgtatacaagtacaatcaatgtagggg

SEQ ID NO: 554 - DNA, 325 bp, Homo sapiens
  misc_feature (1)...(325): n=a,t,g or c
gttcctaacacaaatgtgaatttattggttgatttgatatttaaaatagtacttttacaaaatcatctcagaaaatatactacatttattaaaattcctacaaaccattgcagaaaatattaaaccctctaaccaacctaacactcgctttcnnnggnccctggtgatgattttcacagcttccatagttgcaaagaacaaagaaatcatcttccaacaggggtggaattagataagaataatccaaaanatatttatttctttacagactcacagattgcttggatgtttaggggctcttaccctaggataccctaattattca

SEQ ID NO: 555 - DNA, 579 bp, Homo sapiens
  misc_feature (1)...(579): n=a,t,g or c
ctgtcacccaggctagagtgcagtggcatgaccttggcttactgcaacctccgcctcctgggttcaagcgattccagaagagagaattcttagagtcagagggaggagtagaaggaaaaagatatttaaaaagctatgcttcaagaggacatttcatgctgtcaaaatgagactgtgaatcagaaagttctcggggaactgcaaggtgctctcaactaggggtcggttccttctcagtcatggcactgactcatctccacagggttctcacctgcgggaggaaaatggaggagttgcgcctgtcagaaactgtctgtgtgattcggggaagaatatggagtatcttagtagcattccattattacttgcccctaaatacatgatgccagccccctgcacagataacctcctggcttttatagctgaaatatatttgatctaaaccacgatttgacatctcagagagagagaagtagataaaagtctccattccaggttggcagtagggatcctgcagaagtggctgaaatgaatttgggccaacagagaataagttctacagtcatttgttcngccaat

SEQ ID NO: 556 - DNA, 379 bp, Homo sapiens; identical to SEQ ID NO: 18

SEQ ID NO: 557 - DNA, 427 bp, Homo sapiens
  misc_feature (1)...(427): n=a,t,g or c
tttttttttttcntcccttgnacnataaatttttattggcaggtcagganaagagcngggggtaagggtcccttccttnccatccctctacncanaagacaccctccanagganagnagaagccccagagcctgctgcctcagaggaccttggaggcagacaaattgttgtagtgatcttcctgtccctcgagcaggctgcggttaggtggcaatctcctgctccagccgcgacttgatgtccatgagccgctggtactcctgattctgccgctcactatcagctcgcacatcgcccagctgggttcaataccgctgatcagcgcctggatatgcgccagtgggctccaaagcgcgcctccgtttctgccagtgtgtcttccaaggcagctttcatgctcagctgntgactgcagctcaatctcaag

SEQ ID NO: 558 - DNA, 424 bp, Homo sapiens
ggcagctcactccaggtttatttcagggcagtttgggggtgggggacaaagacccccctccagctcctaaactgggtcacttttctcccaggtgaaggggaccatcctcatgggatcctatcgatgtgagagctttgtgtccaccaggtgtggctgggtgcaccaaggtgaagggtttgagggctgcacagggacccccagcactgggagtttggcctcctccctcagactggatggtttcccagggttggaaaggggcaggtctcccctctcagcttgggacttctcagagggaggagctgagtgtctcctccctcagacccgcagcccctcaaggtgctgcgatctgtgccaccctctttgaccggtccctctgccctcagactagcggaacaaaattacacctgaaagtggaggagcgggt

SEQ ID NO: 559 - DNA, 432 bp, Homo sapiens
acattgtaacaggtttatgcattttgaagtgccttctacacatccacccagaggctctgctgatttcacttatgcccaggctataaaatgcctttctctcatcccccagtagagcactgggatcaccactaggcctagggggcatatcaagggtttaatagactgggggaatgggcaacagaactggctaccttagaggctctggaatgccccccacccatccacccaccaatggaaggaaagtcaggcatcgctaaaaggagtggtccctatctagccccaagtctggagcagaaagggcaggtccattctggcccaagtgacattgttaagatcctgtcccctcccccaatcactgctgcttgccagggtgcctcttcacagttcccatgtggcagcagtagtggcagaggcagaagtggacttattgta

SEQ ID NO: 560 - DNA, 411 bp, Homo sapiens
  misc_feature (1)...(411): n=a,t,g or c
gagagtctcactttggaatcagaattggaatcacattctgtttatcaagccataatgtaaggacagaataatacaatattaagtccaaatccaacctcctgtcagtggagcagttatgttttatactctacagattttacaaataatgaggctgttccttgaaaatgtgttgttgctgtgtcctggaggagacatgagttccgagatgacccaatctgcctttgaatctggaggaaataggcagaaacaaaatgactgtagaacttattctctgtaggccaaatttcatttcagccacttctgcaggatccctactgccaacctggaatggagacttttatctacttctctctctctgaagatgtcaaatcgtggtttagatcaaatatatttcaagctatnagagcngga

SEQ ID NO: 561 - DNA, 374 bp, Homo sapiens
  misc_feature (1)...(374): n=a,t,g or c
ttaagacaaacataacctttattctctctcaaaaacccagagaacagggcctggaaccatattcgttaatttaaccagaatcagaatactttaactttcatagtctcatttaaaattttatagcaatatactgaccattctaaaaataacaaaatacatgttgctctcaactacatagttaaaaaaggtagtaaattctcttacccaaaatagaggaggggtgggctagtgagctgctcaaacatttgtaacaaataaaaatgtatctatatacatataatgatcatgttttcatagcctaaaatcaccattaacaaaatctaataataaaattgtgtcgtgttcaggagttgggaagccaacacattaaattn

SEQ ID NO: 562 - DNA, 479 bp, Homo sapiens
  misc_feature (1)...(479): n=a,t,g or c
atcatcataaaaaatatttattataaaaaattatcacatttctctgtacatagcataaagacaaaaacacaatgtatacattaataaattaagtgggcctgagtattcagtatccatctactagaatcctaaagctcttccccagatttcacaaaggccaatgtagattatttctattttatcaaagttcatttgcacagttggtgtaattgagatactaacatttcttttttctagtgttttaaagatagttcacagtatttgagttaattaattaatcaactgatttaaatctttggtaaatacaagtatttacatgtaaaaatgtttagctcaaatttcagtaaaaaactggaaatgaccaataacctactgccaactgttttggtataatccagaaatgcatgagccggactcccaccattaagaaatggcactgtcnaggacctcngatgataaaactggaatccncaaaaaat

SEQ ID NO: 563 - DNA, 156 bp, Homo sapiens
tttttttttgcaaattttaacacaagattttattaaagacgggcaaattggtgaggcatacctgaatttctggagatatacaaatgcgtgaggctggcatcatatgcaaatgtggctttacaaattggttttattttctagctgtatttaaagagg

SEQ ID NO: 564 - DNA, 108 bp, Homo sapiens
tttttttttttttactttttaagcttttttattcttgaaaagttcaaagatatacaaagatagactatgcaggataatgagcccccacatactccgcatctcttgtct

SEQ ID NO: 565 - DNA, 213 bp, Homo sapiens
tggacatctcagatgtgactcttgctgccaggctagaatttaggctatgtgataattctcagctgtcctacaatgcctgcttcttgaaagaagtcggcactttctagaatagctaaataacctgggcttattttaaagaactatttgtagctcagattggttttcctatggctaaaataagtgcttcttgtgaaaattaaataaaacagttaa

SEQ ID NO: 566 - DNA, 559 bp, Homo sapiens
  misc_feature (1)...(559): n=a,t,g or c
tacaatgtgcattttattccatatcattatncaatgtttacatatagttaanactctcaaganaacgtcctttaccagttgtatgtggtgtctaaatctttaacatgaaggactgaaaagggtggaaatccacactgattgttatcctacagattgtcatgagctgcacgtgtncaatcaganaggaatggaagtctcagaagagcagcgtggcttacagacccttggctttagtgaattcaggcatgcgggatccatagtctcatcttgtaggtaaaactcaagacaaanataanttanntgttggacagagttcntacattggtacaatgnttnaacaaaaagacccacaggggganccttttngttcaaagtnggcnccaattccacacctgattgtggtntccaacattnaaccttcctgtttgnctccancattgggcccttttgaaagggaacttctcctgcnttagntgagggattcccangntnantaagcccactggtngtttgctaaanncncctacaangtnttggcggcatnaacccgggaaantgg

SEQ ID NO: 567 - DNA, 433 bp, Homo sapiens
ttttaaaaacaaagccatgaaaaagattccactttattttatttattattgttattgttatttttacaaacaatagatttgctgcaacatgctctggctcatattattgaattaaaaaatttaacacatttcaaaaatatcaaaaatacactataatgagtcttaagactacaatacgacaatgattgcacaaaaccgtaagatatgagcccactgtctggatgacatccattggcaacagtgagagaaaaccctatagcatctgggagaagtgcatgaaatttagaatacaaggaacttatgtgtgactgactgatcaccaaatgaggcaaacagagcaggattgactgtagctgctttttctcaatctaggaagtgcttaccccaactatggggcaaaagtcactaactgggaaagattaacttgccttca

SEQ ID NO: 568 - DNA, 394 bp, Homo sapiens
ttagcatagtcatcttagctttattgagtaaggcatcccaatctctgctaagattcttctaaatgaacggctgatttttctgccaaactatgcattggtcaaagagaaatcaccacctggccaccccattctgtccccctacaggacactaagggttcttacagataaagggacgatgcattcatgcctggagaactaatcacacctgatttctctgggatctaaaataatgtcaaatttgattcactttatgtaaagaaaatcttttttttctgcaaaccccttcagaacaatgctgccatccatgcaagatgtgtgtaaggccacctctgtatactaagaatggtgccccagcaggtggaaggatggcacacctgctgagcgtgggcacacg

SEQ ID NO: 569 - DNA, 325 bp, Homo sapiens
gaggtggaatgcgtgtgtttatgtaggtagaaaaagtgcacagaacagtgagggtgcagggagcaaggacgtcctggcctggcctccgattcgctggaattgcaaggaccctcccccagtaagggggctccctcaagggtgggaatagagtggaggcccgcacgggagttcttgtctgtgtgcaatccactttgtgggcgtgtgggtttaggtctggctgggccgtttctgaacttgacccctgagaactcatagtaccttaggggcggggctctccagtgggtggggcctcccgctctgagagcaaggcctcggggtctggagg

SEQ ID NO: 570 - DNA, 498 bp, Homo sapiens
gaagcagttctctttataaagtgttattttgatagtttgtggattctaaaatatatatatatttatataaacaccatataagtcaaatatgtatttaacaaagcaatatgtattcattcactttcaagatttgttttggtgtcaaaataacatgaaaaggtagatggagttgcttctgttgaattagctctgccaccaatatgtatcttcatacacgtttggaaatgtttcctgcagcattaggtatgacttgttctgagtactgcttccggtgctaaaatgaacaaagaatttgtacttaatggcatggactctggagaatctatgcgaatcaacctttctaccttaatatctccccaaaaatgtatagtgccttgtttttatgtacagtttatatacagaaaagtttgctctgcatttttgatgtacagtttatatacagaaaagtttgctctgcatttttgatgatggtttggaacattatctacaattttactc

SEQ ID NO: 571 - DNA, 456 bp, Homo sapiens
aaatactttagaagatcatacttttcaaagattttactaaatcatttttttaaacaaaatatacattaaatctcagatttacagaatatagaaataatttatccaaagaaatttgcatttaaaattgttaatattgcacccaacagtatgtctttgacacatttgcattgtcaatctttcccacaatttgcaaaaacaggagagaaatctgaaactaacagaattacacaagctaagttttctgtaaaaaaagaaaaaacttacaattttttatttacaagttaaggaaaagttgtaaacgttcaggattttacttccacagaataaaaagccatacattcttttatcatacctagaaaatgaacatatacacattgtgattacctcataggaattcaacaggactgatattgtgaacattcacagcccaatggtaaaaaacagaattctcgaact

SEQ ID NO: 572 - DNA, 382 bp, Homo sapiens
acaatttaataatttattacattacagtggcatcacaccagcagtcaataaggccactctagggaaaaatctttcagtatttccatgacacattctgtttacaataattcataaactggtaaaattcattctaagaaaacttggcaaatgaaactttggactggaattggcatttctttctctgcttttcgttcccaccatttctttcttttatactacagtattcatattttaaaatgttttaaattatttcagaacattaagatagcagttacattttttaatagttatattattttaaaatgactctttaaaataaagttttagagaaactatattatggatagggctgatttacattttcaaattttctaaaatcagc

SEQ ID NO: 573 - DNA, 262 bp, Homo sapiens
gcagtttaaaatgatttaattgacaaattcttgtgatttacatttcagtaatcaactgcaaaagtgaggaagtaattcatgggcctgtagtgcttttgaaaataatatttatgactcataaaaatgtacattcataatagtatgacatggacatattttaagaaagttcaagcatatacaagcattgtttaatctcacaaaatatattaattatgttggtaatatgtgcattataaaagggtctttagtttaccaaagggtt

SEQ ID NO: 574 - DNA, 398 bp, Homo sapiens
ttttttttttcttatccattgaaggtactttaattttgcagttattgattaattaaaaaacacagttgttttcagcatttcctagctacagtagtgcataggaaattccattctaaacaaagaagtaattaatgaaataacaacacaccttaacattttacattgataggttacagtttacaaggtgctttcacatacattatttcatttgattcttacaacaagcagaaaaaacagtgggaaagattttttttttcaggcttacaatgagtattttcaggccaatgggcagttaacacaagaatataccaagaatgagacagcaatacccataagccacaatatcgtttttggtaggttgacagtttgattcaactgggtattcagcatcggtgagt

SEQ ID NO: 575 - DNA, 376 bp, Homo sapiens
gttggaagcagccgcccacacgctcctaactctgctgcatggcagatgcctaggtggaaatagcaaaaacaaggcccaggctggggcaggggcagtagtgtgaaggccctggattctcactcatgtgagatcttgaatctctttctttgttctgtttgtttagttagtatcatctggtaaaatagttaaaaaacaacaaaaaactctgtatctgtttctagcatgtgctgcattgactctattaatcacatttcaaattcaccctacattcctctcctcttcactagcctctctgaaggtgtcctggccagccctggagaagcactggtgtctgcagcacccctcagttcctgtgcctcagcccacaggccactgt

SEQ ID NO: 576 - DNA, 342 bp, Homo sapiens
aaaatttaagaaatctacctctttatttaacaccaaagctaacatcaagtgtttatttaaaaaaataatggcacctgctttggattcattgatgacaccacaatggggtgaagatctacagggaatttacaattttaggctgacatgaaactaagtagtaactcacaaaatggaaattctgcaacaagcctcacaataaacatttccagtttctactttcagagttgctaactactgcctaaacatatcttaaacacagagcacgttttgttgaaatatttctcttaggacaaacacagtagacatgctttaaataaattaaaattgcaacacataaatcat

SEQ ID NO: 577 - DNA, 302 bp, Homo sapiens
gactgaaaactactttatttgaagacattttcttctatagttctaaacacaaaaggaatgctgttatagtgggtatttcataggcattcttgtattcaaatgaatcacataatgtttacacttttaagctacacttgaaattgaagacttaatacaaccttttaacaaagaaagtatcagtcatatcaaaacataactattcattctacagattatcactttccctaaaatgactactagatatgaaaacattgcagggacagctcaagtgccccattcttaagggttttttttaataggaa

SEQ ID NO: 578 - DNA, 410 bp, Homo sapiens
cccagcttttcaaaagtttattttaagtttggagactagacaaggtcatactggttttacatcctacgtgatataagtatatatacaaagaaaaaaacaacattggaatattacacagcttgaaggtttgcaaaggttatttgtgtcttagttatttctgcacttaatgacacatcagacgcattgagtatatttcataagttgttgactagcaaagatacaatcattagtaacccaagtcttcaaaattcacaccaaactttatgaagtcattcagaaagagaaagtcaatcctaaaattaaaattggcaactatgataaataccttcaaaaggatgtagatgtaatggagatgtttaaaagtttagtttcattaattgtaaaattagcatgttatatttactcaatat

SEQ ID NO: 579 - DNA, 376 bp, Homo sapiens
cacgtgaaaaaaagttttatttagggagctccagggaatgcggtgggaaaggagaggtgcagtgtcattgccgccctctcctcccacctagtgcattaatagtggatgggagcatctgacagaagtgagatcaggcagtgggtgtctgcaccccacagcgcatgttggctggaacagcaaagtctatctgctgaggtttaggcaagttcaggttgcccatgattttgacaaactcctcacagctgagggtgagccgagggttcagagtcctctcctcctccacggtggacactgtgaacccatggtaatcgtgagcagggtagatcagacagtctcctggaagtgtgaagatcttttcatggaccgagtggtaaag

SEQ ID NO: 580 - DNA, 275 bp, Homo sapiens
accataaacaaataaaattctttatttaaatttctcttgtggggaaaatatttttctttaaagcacacttaaaagtaatttgcatttacttcctgtaaagcatttccatttcacaattagcaaaactaaaaggctatgtctcttcatgcatttatttttgttagaaaaatgtcccatggtgctatcaaaccgattttaaccatcatcaagcttaactttgcctctgttgacaacatgactacaaacatgaatcaaaaaggagttaaggaatttta

SEQ ID NO: 581 - DNA, 435 bp, Homo sapiens
aacgtcccaataaaagtttatttatggacactgaaatctgaatttcatataaatttcatgtcataagttttcttttttcctccaaccatttaaaaatgtaaacattagtcttagcttgcaggcagcacaaaagcgggtggtagaccaaatgtggacccagggtgtagtttgccaaacccttttattagatcaccaaagttacttttcttaaaataccttctatttttcacagaaggtataaatggtaaacaacatcttaaagcatcggtagtagtggataccttggacatcactgtcactctcttaccgggtttaattttgcatggctggtgtgggcgtaattgagtgtgcatgtagagcatctttataatattaccatcagcacatttggtacttgcacccttgtagttctaggaaaagtcctaaaaatctata

SEQ ID NO: 582 - DNA, 425 bp, Homo sapiens
tttttcttaaaaagaaatggtttaatttcatttttatctgggaaaaaaaccacaaatacgagtttaaaatgaaatgacaaatacattgacatgtcaagtgtcattttttatggtattatgcttattcaaggtgtgaagatacagaacctctttataaatttctggcatcaaagattcccaccgtagataaaaacaggttggttataaaatgtcaattcattaaatattcaatttttgttctttgtttttataaggaatattttgtagaaacagtataaaatagagtagacttttggaaattgaattataaaattttagaaaaaagtgttaagtcctaacttttctttgcgaaccaacaagagagtctagttttaccttggggagttacctgtgaagtgcattaggcggctagagctgtttcagag

SEQ ID NO: 583 - DNA, 392 bp, Homo sapiens
ctgttagagacattttatttagaggcaagaaatggttaataagatgagacccttgggtctaggagcgttttgctcttttgttttcttccgttagagtgacagattttttgctgttggtgaaggcccttgaagactgtagtttaaattcaactggaaagtggtcgctgacatccagggcctccttttcagtcagcttgtaagctttctggaagtcaaaaacactgtttgacttgggaacaacagaactgacgatttcttgtcctctaagcacaatcctgtcatatgcacagttggtgctcttcttcaccgtggtgtcctcttggtccccgatcagccaaacaaacctggggtcagtcctcaagcggatgttcttccaggccttcttggggacg

SEQ ID NO: 584 - DNA, 353 bp, Homo sapiens
catttttgttttctttttttgattgaggtaaataaaaaagctttatccagcaacacggagataagagtctgtccaacccgacaagttccagaccccaccctgccctcacatcaggctcttccggtactgactgtgcggggtggtctgtctgaggtgggagtccggggtctgcaggtccatctgtctgtacaggtctctcagctccctgacctcctgcagcaccctctttgcctggctccaattcgatgatgcctctcccagcagccgttccgtctccagcagcagctgctctgactcagaatccggcggagaccgaggggggtccttggcctttcgcttcccatctcccagtc

SEQ ID NO: 585 - DNA, 460 bp, Homo sapiens
gtcctatgtatcatcatttactctgggaatcctactgtgaaatcatgtctgtatttttctggagcagttcacatagagtagaatgtggaatttcccgtgaacgtctccttcctcccccgtatctgccgcctgtcacttcgccaccgtgctagaatactgttgtgttgtaagatgactaattttaaaagaacctgccctgaaaagttcttagaaacgcaatgaaagggaggaacttgtcctttacccagtttttcctttgtaggatgggaaagtataaaaaggcacagaaggttgtcatgggctgttccttgggggtttttatcctgctcaccgtggagataagcctgcgctatgtctaaccagcgcacgccaaaggtctcaatgccttttggtaacatccgtcattgcagaagaaagtttacacgacgtcaaaagtgacgttcatgctaagtgtttttcc

SEQ ID NO: 586 - DNA, 491 bp, Homo sapiens
tttttttgaaggacagggttacgagtttatttcttggtgcctccaagagctcatggaaaagcagcacagtgagcaacaagcaacagtggtcagtaaatgtatatgactcaacacattgccacagtctcagcttggctgtgtggtacatgctgccaagggtcgggtgccaagagagagcagaatgaagccaggtccccaaggaagtgagggcccaaaatagggagtgtgggtgatgagggtggagttcaaatccagatgtcagagctacaatcgcccccagggtagcggacgtcatgggcaagggctgggctaaggggctccttcccgaagtccaccaggaagttggggttcaacttcagccctccttttactgtgtctacatcaacctgcagcatcacagagccttccctgatgagatcagggtaaaactgcttgtcccaggcactgtacagcgacgtggtgatgtagaggcgcttcccatccaggctgag

SEQ ID NO: 587 - DNA, 257 bp, Homo sapiens
aaatgtaataagaagtttattggatttctaaatataataaagtagttgcaactcttttacagaaaaaagaaatataatttccatattcattcttatagagcattgaaaaaacataattggtagagaaaactgatagaaggtaaatagaaaaacaggttttaatatagtcagataatgcataaacacaaaagaaaatacctaaatcacttgcttataacagattttattctcttattttcatactgaactatgtgtgc

SEQ ID NO: 588 - DNA, 313 bp, Homo sapiens
  misc_feature (1)...(313): n=a,t,g or c
cgttaccatcgtccgtgcgcaccgcccggcgtccagatttggcaattnttcgctgaagtcatcatgagctttttccaactcctgatgaaaaggaaggaactcattcccttggtggtgttcatgactgtggcggcgggtggagcctcatctttcgctgtgtattctctttggaaaaccgatgtgatccttgatcgaaaaaaaaatccagaaccttgggaaactgtggaccctactgtacctcaaaagcttataacaatcaaccaacaatggaaacccattgaagagttgcaaaatgtccaaagggtgaccaaat

SEQ ID NO: 589 - DNA, 299 bp, Homo sapiens
  misc_feature (1)...(299): n=a,t,g or c
gcaggccaaaaccntagtttatttcagcatcagcagtatcttagccatcaaaaaaataaactntaccaagggtgacggaagtntctacagcaaggntaagggctcgccagacggcgaacatcaggggtgcatggtgggcactgcccaggcaataagtnaggaagcagcagggctggtntcgggtgtgggccgggcttnatttctgggcaggcatgaggtcgtcgatggcctggccctgctccagccgctgctccatctcgatgagcagcttcactccgtccaccaccatcttgcaccag

SEQ ID NO: 590 - DNA, 413 bp, Homo sapiens
  misc_feature (1)...(413): n=a,t,g or c
attttaaggactataaagagtttgatttaaaattatgcagggcccctatgtgggattttttaaaaagcaaactggtgtgtattctcatgtggtttgcacagcccagcctcacagcactattgtaaaccctgctctttctgtctcgctagacagatttttttgtttgttttcttttttctggttgttttttgttgttgttgttgttgttttacagctgaaaccaaccagcaagcccttgatgaccaagaggcgtttctttcaaagctatagggcacaaacaattgaccatagatgactccgtttgcattcttctgcagaattatttccttcagggacagattttccaacctaaggaactacctaccgngtgtattctctttgacgggggagagatgaacccttcagctggttag

SEQ ID NO: 591 - DNA, 174 bp, Homo sapiens
tttttttttaatataaaaagatcaatgaaaaatttatttataaatttttcacgctgggctacaggtcaatatcgtacactcaggaatgtgctgcacaaactttatccagttagcagtgatcaccccgtgacccacacacagcttcgatataagcctagaaagtcttaacattaa

SEQ ID NO: 592 - DNA, 286 bp, Homo sapiens
ttcttttttcagtttaattccatttattattctttaaggatacatacatggagataaagtgatgaaagagaagaaggctatggtcaacacaaagttcagtacaggggttccctctatcagacagggatagagataggttcagcaaaccgcacacggtacctcaggggaaaggcaataaggtgggtggtaggcacacaggggtttgtttattgtcattattattactctttatactttagcatatatattatatgtgtatatacatatctatattccattgcatgta

SEQ ID NO: 593 - DNA, 340 bp, Homo sapiens
tttgtttaaaatcaaatctttattcaaaagatagtcaaggctgacaacttatgcagtctgtgacaaagagcaagtcaagccaaggaaaaagctctcacaaagaacgtagctctgttctcttaaaatgtgtaactgttttcctggtagagcaaaatttcttgaaaggggcccagttgcgactttaagcagcgtttaaacagcctgcctccgtgtccagcatttaaatcagcacaagagaatcggctgcctgtgggcctgcctgagcctcagcctagcttggagtctgaggctccaaggaggcctgtgtgtataagccatcccatggtcaccctcctggaca

SEQ ID NO: 594 - DNA, 404 bp, Homo sapiens
ttttttagggagagtaaagttattttattaaatcatgcacgtcacgtgtgttagtgcaaatagtttaatctgtactccagaaattctattgtactttatatctttacaaaatagatttaaaacaattatttactttaaaaaatgtaattctgaagttaagcatttcagaacaatatttgcaataacctatatacaagaggtactgggtacactggcatattagcattctgtggtggagtggcttcctgcaacagaaaatgatgaaatgaactatatgacagtattttctacaagtcatttgtgactaattcctccataaatctagtgatcttcccaaaagcaatctcaaatagcttaaaatataacctttaaagtataaacagtgactgccaaacatcacaagg

SEQ ID NO: 595 - DNA, 345 bp, Homo sapiens
gtgattccaaaatagagatttatttattaaggattatttagtttctgcataaaaatctccaattgttcctcattgggttttttcttttaaaacacacatcaactcttttggggttgctttgtttgccccagcactttaaaaaatacagctctttttagcgccaggaagaacagttaaggttaaggcagtgaggcgttttcttggatcttagcagctgaagggttcatctctccccgtcaagagaatacacacggtaggtagtttcttaggttggaaaatctgtccctgaaggaaataattctgcagaagaatgcaaacggagtcatctatggtcaattgtttgtg

SEQ ID NO: 596 - DNA, 491 bp, Homo sapiens
  misc_feature (1)...(491): n=a,t,g or c
tttggagtccaagtctcttatctttattttaacagactggcagcatcaggtcgcagcagcagtacagggttcctggctgggcagcacaggcctggggcgacagtccatgtcttgtctgcccagggcagtgtcaacttaggcctctactccatggctgtgaaaggacagcagcctcaaggcagtctagctcctgggcacaggcagccaaaccccctcccatatccagctaaaccagctccaggaaaggagaaggtcctgtttccccggcatccttggggcccagggactggttctttcaccggatgatcttgcctggttgaaccacagcagcatttgggctttttcatcctttcctacatcaagaactttcccaaatgtgggccctgggcgtaaggcaaaacagtggccttggccaaggctctgggcctctgggagggtcccatctggcatcaggtggcgnacaaacagggtgtcagcacggagagagctgg

SEQ ID NO: 597 - DNA, 488 bp, Homo sapiens
ttttttgcgtttaacatttttatttttaactccgctttggtagtacaaaagtcataaaagtacaaaccagacagttaaaaatacacttgacactcgaaatggtgaaaattttccttacaaatttttacatcaaggtagtagccaactcattgatgacaccaaaaagttgtccatcattagtgttttctagagaaagtctgttgtggattccctcatccttagaaaggaggaggagaaacacaagacctgtaaacatcagttgctttgggaacacaggaattctcatcagatagttcagtataaaccagtaaaaagcgtatgtgttgaaaatactgaacgcttaattttggcaaatttggaagcctgccagacaaaaaccgctcaagtatttattagaaaatatttaaaacatactcttggtatcaatacagttttaaatatttttgagtattctcttgcctgttgtattgctatttaaaaaaaagtgc

SEQ ID NO: 598 - DNA, 412 bp, Homo sapiens
tttttttttttggagaaaacagaacacccccaaaacatttattttttttttagaaaatcatggctcactatggtagtatacaatattgttttcacacatgtacacttgaaaccaaatttctaaaacttgtttttcttaaaaaatagttgttgtaacattaaaccataacctaatcagtgtgttcactatgcttccacactagccagtcttctcacacttcttctggtttcaagtctcaaggcctgacagacagaagggcttggagattttttttctttacaattcagtcttcagcaacttgagagctttcttcatgttgtcaagcaacagagctgtatctgcaggttcgtaagcatagagacgatttgaatatcttccagtgatatcggctctaactgtcagagatgggtca

SEQ ID NO: 599 - DNA, 366 bp, Homo sapiens
taggaagggattccttggggaccactggatgctggtagttaaatgccaggagctgaatggacctgaagatggaggagactctgcagtcttggtcagccacccttggggcattgccaccttgcactctagcaggattgatggtctctggatttgtagctgtgaccggtcatggtggaatgctcggtggtttgcactggagaggcccacatggtggcgactgaggccctgtgggttgaggttggctcatgatagctctgaaagttgatggcacaattgagacaaggacgtggagttctggaactttcccagggtccttgcagcccgagatgaagccctccaacattgcagctcactgctgtgaaggct

SEQ ID NO: 600 - DNA, 418 bp, Homo sapiens
tttttcttccataattctttattaaatatttgacaagttgcatcgcttctttacaatgacttcattttgtcacattagtcttttgctgtcaggaaaacaatctacagtttctctttagatctctcaagaaaaaagaaaagcgaaaggattgttcttcaagaaaacttcctgtgtgtatcaaattcaaccatattttaaagctattctgactgtgaaaatgagcattattcataagttgccttaaaaaaattcaaggtagtttggtttttaccactgtatcaaatagtacttggcttcctattaggaggtgggtttataataaaaagttatgaaacattgataatttatttggaatgcttgaaactcttttcaccttaaaagtcactgtttttttcatgtttcatttgatgatagatcc

SEQ ID NO: 601 - DNA, 412 bp, Homo sapiens
ttttttttaactaataacttcaatttttaataatggaaacaattttgccattctagaaactattttaggggagaaaaatcttccctacaaaaataaacttaaacccatcaaaattataaatattataactttttacttctgccatttaaaatgctctcctgcaataccaccccttcatttaacatccttcctgtaccatcacatattgaagagaaaacagtattacagcaaagcttagatagtttaacataatgatttgtacaatgattcttaaaaaatctttggccttagtggccttttttcttcacttacacattaaaaatgctgctgcagtaaccagtgtttgggaaaggacatcagtcttcaagaaccataaactgacagaatttcaatacagtaggtttccaaattg

SEQ ID NO: 602 - DNA, 309 bp, Homo sapiens
tttttttttttttttttttttttttttcattattggtagctttattaaatttgtttaccttctaaaaaaaacgattacaaaaaagaatacttcatttaagtgtaatactggctttatggacgtaccgtgatcagaaagtgaaattaaagctcatggatatgcgtgagaagagaatgggcgcagaggcacgagtccagtatcccacggagagaaggaagtgtagagagatgcgtggacccatctcaggggtcacgcattcctgggccaaggagttgcttctaagagcttaaaataaatgcactggctggc

SEQ ID NO: 603 - DNA, 404 bp, Homo sapiens
acatttcaaatatattttattactttccatcttagaaagaatatgaaacctgcatgcaatgctaatggtttctgacatgtacatagcatataacacagcagtacaatgcggcatatactggggggcagtgtgtggagggggcgttcttaagggtatatgtacagaggaaagggcgcatggtcatcttagctttcgaaagaggactgcactgtttaacattgaagaattacatggggaatcacaaatatattgctttagtactgcatgttctgttgtggtgagggaaagaaacatgctttgaaggttttcccttgtcaacagaatgtgtgtctgtagctgtgtattgcgcatgtattcatatatttttaagttttctcctaaggtttttgctgacagtgttggga

SEQ ID NO: 604 - DNA, 566 bp, Homo sapiens
tttgtttaaatgaaaaaaagaaaactgaatatctccattaagaaggcaaaaaagtgccaggcacgttagcacacacctgtggttccagctactcaggaagctgaggcaggaggattgcttgagcccaggagtttgagaccagcctgggcaacatagtgaaaccctgtctctaagggtgaaaagaaagaaagaaagaaggcaaaatattagcacagattcattgtagagaaaatgttatgtatcctcacagactggagccacatacaaagagataagtagccttctttcccatgcttccagataaccaggatgcatctaaggtaagaggttggaggaaagaagacacattgctctgattccaagggtagagggaataatgaccagatttcaaccctaagatagaacccaaatacttgggaggcttgtggttctttcttcttaatggttgataacacagtgtccctacagagaggtcatctgaaactcagaggcaaataactcatcaggggcagcaacactggcaacctaacttagaagccccgtgtggccccttttttatttggagt

SEQ ID NO: 605 - DNA, 432 bp, Homo sapiens
tttttttttttttttttttgaaaatggtgaagtcatttttatttcagtacttgacaaaataccccataaaattcaaaacttctaccattatacaaaaataggtctctacaagtgatattatctgtcttcatcaccagtagaatatattaggcaaaacatgtaacttcagtagccttataagaaaagtgcaggacacctcgagctacacattcagcagtattgtaatgcgtaaaagtttaatcttttcacccatttgataaatacacaaggtttataatttaatgttttaaattagcattccacaaatatacaggtaattcaataattattgtgcatgaatacatacacaatgcttatatatacaaattccagtttgttttcatgtgctggcaagggatttgtatacaatcataagctgtgttcatattggtc

SEQ ID NO: 606 - DNA, 281 bp, Homo sapiens
tgttgtgtataaatactatgctttaatgagccccttaaatagaaattccactacaaaaatacagaggagatagggtgtttcctgtatccgcctcattcccatagaaaactataagggaagaaatagaacttggaattaaagcagcagcaaggcgaggtgagaatgcgatttctaggccatcttgttgggactgatgaacagcatctctgatctcatgatttaacatctggttatccagaagggatgggattggcctaaaaaaaccgatcaatttctggatt

SEQ ID NO: 607 - DNA, 263 bp, Homo sapiens
cgggcccaaactcgtgttatattatcgaggtggaaaacagccatatgtattaggaggggaaactgaggcagaccacaggacggggctccagagggaggacaactaggcccagaaccccttctggaggctcagagatgccagtgttccaggaggtctcacagcatgaaaggggcctgactacattcgcttttagcagtcggaatggcggatggtcaggcggtggctggaatcacatttacatccttcaaatcagcatcctgggc

SEQ ID NO: 608 - DNA, 424 bp, Homo sapiens
ttttttaacagtggtaaacagtttttattcaggcaatgaaacatggaaaaaatatattagtaatcattataataatttgtgagtataacttttacaaatagttacttgacatataaaaagggaaattactgtgcatataaaatttatgtagatgaatattccacacaacacaatcctgatagcagtagtcaacgcagcactcatccctccagatgaggggctcctcacacacttcatggcacccgtgggaacacagtggaagcagatgtgcaatgaacatttacttggcacattagtataatgggtatctattggcaaacacacacttgctaacagcaatactgaaaagtttactgctacctctgagatttaaaagaaatgcctggatcctatcccgacggctgagaaggaccgaggctgaggc

SEQ ID NO: 609 - DNA, 400 bp, Homo sapiens
tttttttgataggcaaaagcttttaattgtatagattaaaataactttggacaaaaattaaaactcaggcagagaatgttttttttttcaacaacacaaactagcaaaaacaaaggcacagtaaacattgaggcagaaagtttccagcgtagagatatgaatataataatagacacaggcagggatgattaataaatgataaaatgtttacaggatgatcatcggaatacaggacatttctacttttgaaaaccaccctcccaaatacttcattataagtaaggtgtctctaaaagggacagatctcctagacccctccttaaccaagtaaccagtcctgatatcatgataatgctgatggacaaactagaccttctctgcccgcagatggcctaaggtt

SEQ ID NO: 610 - DNA, 441 bp, Homo sapiens
ttttttttttttttttttgtgctttaaatatatttttatttgtttttctttatattaatttttttctcccatagaggaatagcattacagtctaacaatcagaattctgttacacacatacacaggcatgccacatgacccagttgaggtggttgtctccttgagtctgttgacacgtcacatggtcaaagtctcctcatttcagccagtctcaacacaaaacacccaacagggatgcactcaacttgttggttccatgtggaactaggtggcagggcgagagggaaagtagtagaagggggctatggtgtgtctgcattcagtcccctcacataaagccacatggatctaggggggtatccaagagctctggtggggtccgtgttgcacctaagacattataggtcagagcaagttgctcagagggttccaggcaggggg

SEQ ID NO: 611 - DNA, 406 bp, Homo sapiens
tttttttttcggcatcttatttggttgtttttattgttctgtggcctcctcccacctgctaacatttaggcctcagcacatccggtggctacaactaggaatcacacattagtaagcaagttcatttccatttcctgaaggatgaatttatcttgggaacatttgagatgggtacatacctcccagagccagacttgggaggaatctgtcaaaaatatcaagatgctgagccttgtcttagaaaggggcttcagaaatgctttcatgggcggcggcttcttcccggggtaaaggtctcgtggagctgcagggccttgctcccaggatggtaaaacagggacccagagctgttaagtggctcccacaaagtcacccaaccaggctgggccaaactgggtttgatggc

SEQ ID NO: 612 - DNA, 305 bp, Homo sapiens
ttttataaatatgtaactgtatttttcttcctgtccagaaactgttattgaataaaattcaggtatattcctccaaaacccacacagttcagagattttcaaacaccaggtttccatttgtattaaaatgggcaagataatgaaggcacaggctcactttgtatcaataaaggacatcaaacacagtcatgaggcactaatgacataagcaatcacaaaaagcaagtgttcaaagtcttcagtaactcttctccctttaacatttggcaaaactcagtccagatattttaatacctcagaaagaa

SEQ ID NO: 613 - DNA, 284 bp, Homo sapiens
tttttattatatagaatttgtacaatatatttcttttcgtttgcatattttacccacagcttaacatcctttttacaggctgaactcactcaggctgatagaatcaaaattctttcaaccaaataagaaaaattcaaaatcgtaaacccgtaagaaaacaaattaaaaacggtgatgaaaatacgtcactcctctcgttaggaacagtgtctgtttgtacaacaggtatgctctggaacaggatttctttacagcgtaggcacgtgtttccacctttgctctgc

SEQ ID NO: 614 - DNA, 430 bp, Homo sapiens
ttttgcgatttttcttttttaatgatcaccatgaaatccactgggccaggccctggtgttctgctgccatagtcagagtcagagtggagggatgaccccaggaggggacaagaagccaagactgggctggggagccgagaaggagatagataagggggagagggtgcagtggggcaggcagaggaggaagtctggagccctggataacaacacagatataaggtgaaggcctccctctgccaccccagccctgagccacagacgttgaggtgcaagaagatggggattttggccacaactcctttcccatgtcaaagggaagacactgagagcagacaaaggccaagtgcccaggggcacaagaacaagttaacaagtaaaacaattagggacaccacctcctttccccagcccatttttcacatttaca

SEQ ID NO: 615 - DNA, 318 bp, Homo sapiens
ggttactcattacacatttattgtacattttcacaatctggatgcgccacagaatttggggcatggggtggtggttgaggcgggcaggggacactgggataatatggggggtctaaaacacagcacccccacctccagcatctctcctaccctttcacaccacagcttagatatccctgctccccctccacacagaaaaccagaagtgtggggggaagaagctttgtggggccccctcgccgtggcagggttaaagggactggtaccctacaaaccctgtaaatattgtgtccatcttaaaaaggacaaataagaccc

SEQ ID NO: 616 - DNA, 400 bp, Homo sapiens; identical to SEQ ID NO: 55

SEQ ID NO: 617 - DNA, 364 bp, Homo sapiens
caattttaaaatgatctctttttaatttcttaaaaagcacattcacagcacactccaagaatgccacacagcagtggtttgctgctctttgtcagaatatgtcagaaaacaaaacaaaaaaagttttaaatgctaaagattttaaaaattagttctctgaaatttctgtaaagccagtatcaccagtcatataaatctttattttggaatcataaacctttcaaaaatgtaatgagcatctacccaaaattacacctctctgaaatgtaattaaaagctatccagcaaaaacaaaaataaatatttttctagaaagaacatatttggcattttaaaataatgttaaaaacagctttctcaaatg

SEQ ID NO: 618 - DNA, 402 bp, Homo sapiens
tttgcatttaggaacaaaatttattccaatttaaaacagagttcatttcaggagaaagatatgaaaagtcgacttccatcggtgtctggattaagggtcagggccggtggctgtgggaggtgacactgagccgctcctcagcccctcctcccatccccaacgcgcacaacacatgcatttcaaatggtaaaaggcttaaaaacagcttgtatagaatattcttttttaaatagattaaggttgaaattgtctgaaatcaggactgtgtaatatacaagtatcactgggtcccgtccaccaggccggccacaggatctgctgccaccactgggggacattggcacggggatgcctccctgggggagccgggggacccagggcatgggtttgcagtggccgggg

SEQ ID NO: 619 - DNA, 129 bp, Homo sapiens
gcaatattcaaaatctaaacacactgataaattattaagattaagattatttatgtgataaatgaaatctcctaccaatccatccagcctttaccagggaagaaaagcaattatttcatttcagataga

SEQ ID NO: 620 - DNA, 419 bp, Homo sapiens
tttgttgatggagaatgttttatttatgtaattttcatctgtagagatgcttctgtcctcatctttatatttgtctccctcttctcattgaactgcaaaattcctgaaggatgagacctgggatgtttaatgcaaactgtacattctcagcagagcacaagtatcaaagggacattggatatattttaataatgatctaacacaagcaaaaataaccactgaaaatataaaactcaacaagagacataagaaaaaagcagacagaaaacaaaaaaaattcttattttagaatgatgctatatgtaacttgtaaaatatttaagtttttatacatgagattatattggtttccttatttaaagaaaaaaattacaattaagaatggaaattaaaatgtaaaaccaagataaatatttttg

SEQ ID NO: 621 - DNA, 427 bp, Homo sapiens
tttttttttttttttttaaatcatctttaatgtatttttaataatttttttgcctcatttaccagataaatcatctaaataaatagatgctatacagtctcttaccaatgtcagtacaaaaataaaaccgcgctctacatccactctgactctcccagcacacacacactcagcaaaggcatgtgcttggaatcaactcgtgcccccgacccctcccagatacattcatttagtctgaacaaagctcgaagctcattctgtgcaaaggaagcgctcttgtgctgagacctggtggccgcagctggccacttcgaaagcaaaagctaaaccacctcacagaagcacagcgcctgcccccagaacaaggggacaggaggagcttggcaacgaggtcatcacccgaacagcagtgacagtcctgcattcc

SEQ ID NO: 622 - DNA, 123 bp, Homo sapiens
gcttagagaaaatgttttattttcattagttgacaactagttgttcagttgaatggtaagtttcacactgcatcctaaaataagacagatactctgctggcaagtagaaaatagactaatttc

SEQ ID NO: 623 - DNA, 357 bp, Homo sapiens
taatatttgaaaataaaccaactttatttgaatcagtcaataccaatcaagactggaacacaaattggtaattggttcagattcatgaggaaaacactcagctgtatcttcattaaaaggcattttacatttattaaggcttgaaagcaagtcctgttattcatcaccatagttaaaggtctcgagaaaatcaagtaactatcatttggagtgtctttgtaaaatgaaacacttgttcttttacaaaagctaagcatcttttgttaagctagttaactccccagcttataaaataggacaacgaggtggccaggaaagtaagacaaattcaaacatcagctggataatttatatttt

SEQ ID NO: 624 - DNA, 302 bp, Homo sapiens
caaatatttaaatcatttattgccattaagttacagcatctcaatatatacactgcatggaaatacacaggtaacatttttaaacagtggggacaaaattttaagtacgtggccagctgttggttgtcttgtggtcattaaagacaatgttaagaatcaggagtacttaagtgctagtggttacaaattttgttctcttcagtttttcattaagtaaattctaatagatgatatacatattactgcagataaaaccatcatcagaaattattaaattaattgcatattttgagctactcttt

SEQ ID NO: 625 - DNA, 438 bp, Homo sapiens; identical to SEQ ID NO: 61

SEQ ID NO: 626 - DNA, 376 bp, Homo sapiens
ttttacttgatcattctttttatttttacaaagcatggcaaaatgaggaaaccactgacaggtgaagaatttgcacaatggaaaaccaccttgaccatctcatgactttatacaggaatcggaggtaagtgttcctttaaagtgattttgtcatgaaagagtcatctgaaatgactctcgtgatggaggaaaggaaagtaatgaaatcaacattcatggttatttaaaatgccttaaaagctaagcataatatacatagtaactccttttcctagtataaaaatagtgccagaaactatatttgttcaaatatattgaaaaggtataagaatacaaatagatattaacagtggctagtgatgcctcataaggtttt

SEQ ID NO: 627 - DNA, 493 bp, Homo sapiens
ttttttttttttttttttgttactaacgttttctatttattcattaataaaaagtgcatagtacaagccctttatcccaatccaagtactcagaaaaagattaacaacagaccctggatggcacagacataatttgtttggcgtgatttaaacatataaaatcagtaattaacatttagcatatcacacgaccacttttgcttttaacaaactaatcttcacacatggtaacaaatacctatgatttttcatttagaaatattataagaagactaaacttactattgcaacaacaaaaatttaacccattaaactagaaactctcttcatttttccttcttcaaattactgttttgtgtcttaaactgagttggtcaaatttgagcacataattcatgtagagtgacagactttcatttagagtgatagacttccaaggttcctttgaaaatttaagatactggtaattccataaacactcccacaccacata

SEQ ID NO: 628 - DNA, 396 bp, Homo sapiens
tttttttttttttttttttttcacaagttatattttattttaacacgagattaacatatagttacaaggtcaatacaagcctccagtggaagctctttatttggtttaattccatctccagagacaaacaggcaactctaggacctttacagtggcgatcggcctcacacagcaaaatgcctccaaagtttagaattagtgcaacacacatacgaacgttttaaaggtgctcaacatcaggttaaaatagaattctggacctttttaaaaagtttttggatgatataagcacaggaggcagagcacataagaaacatgaaaccaatatttctggaaaaacacttagcatgaacgtcactttttgacgtcgtgtaaactttcttctgcaatgacgga

SEQ ID NO: 629 - DNA, 336 bp, Homo sapiens
tttttttttttaatgtttgacttatcttttaatatttagataagagatgatacttaacattcacaagttactgtaaatgctggggaccataagcatggggcaggccacggtaaagatcattttgaatgggcaagtctttcaatttcccttacatcacaccaagcaggcaaagcctaaatacagggcaggacttgcctatgtgatgtaccattccagccctccttttcaaagaaaacttgagcagggaccctgggataccaccagcgatggtgggactcccttttgcaatccaaataagcacgatctaaatgagtccaggttggagcagataaggaa

SEQ ID NO: 630 - DNA, 438 bp, Homo sapiens
tttttttttttaagtgtgatccatttattattgctgccatttgtgggtacattctctcaattctccttaaatcccagtgatgcttttatacttgcaacacgtgtatccacctctagcttccctgtgcagaaatgtttggcattggaatgtgaggtatctctcaggaaacagagtggcaatgggtaggatgaaacctacccattgagagttcatgatattcattgtgaaataccactagatatagtccttcattttatttagagagcttgaagtttctgattttatgtagaacagaaaaagaaacacaaattatacaaaatttaagtgcaatcaaaaataaaaatatatgttaaataaacggttatggtacaaattttgcaaagccttcaggtgagccacaaataatcttggaaattattttaataaagtcattttggt

SEQ ID NO: 631 - DNA, 398 bp, Homo sapiens
tttttttttttatcagaaacgtgtattctttttcttttaatagtaaacctctttacaacaaatatagtgaaagagttttcaaacaaaactcataagaatctcgaggactttgtcttttcttattgtgtagaatactaagaaagcatcaccatacagcacgaaaagaaatattgaaaacaaatcaacagcctcacacttggactcgccctgccccaggacccaggaagagccccaggagtgtgggtgattgtcaggtgtgggggtggggcacctccatggcccatcctgcccctcccttcctcttcctcaccacctccctccctctggagaatggggaagaggagagaatccagattctccattccagcctccctccccccatacaaataccattcctt

SEQ ID NO: 632 - DNA, 387 bp, Homo sapiens
tttggtggcaatcacagtctttaatcattaattgtcatatttctgatttgttagcaagtgccagcttgtaggctggttgaagtacagaactcagaggaaaaaagaaattaaattttagctttctggagagcagcccctctctggcaccatcaaacacttctttgtttcccttcaacttggaactcttcaaacatcaggggttgtgagggtttggccattcttttatcttgggtccatgtgagtgacagaaatggtgcggcctgggaaagatctccctcctttacattttctcttctccctcctcctccttattctaaaactgtgcctccaacagaggggcaggggctcttgtagagagatccctggcccaggacaggagatgccaaa

SEQ ID NO: 633 - DNA, 331 bp, Homo sapiens
ggctgttatatagatatatatttaatataatatgtgtgattgtggttacagatacatatttggtgctttatttatccagaagcatgagtcacatagtacataaagtattgaatacaaaattctaaagataaacacaatttttcttgaatttaaaatatatgggataaatgcttacaaatggatttataaacctttcacttctacttcattctcctggctgtgtcttccgaagatgagttgctagttgcaacattaaaaaaaaatagctccttcaaatcctgacactatatgacataaaaagaacttttggcaaatatttattcagattgct

SEQ ID NO: 634 - DNA, 460 bp, Homo sapiens
tttttttttcagtgcatttgccatttttatttcgctatgcagaaacatacattcaccatgggctgtgatgcaggtgatcgtgtaatggagaatctctctttttgaaggctatttataactaacactaaatagttttaattacagtggaaattctgtacagtttaaggcttggctctgaactagaatgtaaatatggaccagatttgaaaataaaacactttcttttcaagtaaaagaagaaaaatcaattaaaaaatacacggcacggaaaaagtaactaagaaaacaaagccacaggaagcccagcagtttctcctgaagtgaaatttcataatattgtaaactaacaaaaatacaggttttcttcccaaaataatgacaatttaagctctctggattgaacacagaccaaagcaaacaacaaggaagaaatcgcattaatatgctaaaatcagtacta

SEQ ID NO: 635 - DNA, 521 bp, Homo sapiens
tcagagttttctttaactttatcatttataaagccatacaatgcattgcaaagaaacaaagcagctgtacaggagtggggacgcgtcagtgtacaatacattcatgtccaggataaggagcatacaccaggatttatacacggtggcagcggctataggcacgatgatacaaaatataaagtatatttccatctatataaatacacagctggggtggggaaggatgctgggtgatcttgtttcccccgcagagggcctgggaggcagggagggtggtgggaagggatttcttacatttgttctcaatgatgggtctgaagggaggagagaaatggggaaacacagcctgcacacactggatgtgctctcacacacacgcacaaacaaaacacagacacaggagagtttcaaacagcttaacactgattggaaaacaagcttggggacatccctctacagtaactccactgctggcaagagcccaggcgtgggatatgaacagaggtcctccaacattttgg

SEQ ID NO: 636 - DNA, 271 bp, Homo sapiens
tcacatgatagttttaatatttatttagcagaggggtaaattgaaacatcagttctctagaccagtcaggaaatgtatgctttgtgctttataagcttacattcaacatagatgacataagttaccatactcaaatgtaagatagggagaggtagaagaaatagctgagaacttgaaaagatgtactgttattgtcaacaaaccaatgtcttctcccttcataaaattgtgtttagggaatattaacaattaagcttgtatacaatagtaa

SEQ ID NO: 637 - DNA, 386 bp, Homo sapiens
tttccaaaagtgttcttttatttctagtaacatatattgtataaatactctattttatatgcacttccacaaaagcgatataatttaaaagtttttttcattagaaataaatgtataaaaataaatatgttattataggcatttattactaactatagtccttcttggaaggaacacccaaaccaatacttataaagtacatgtaatttatagtaacatattttactatatacatatggaaaaaatcatattctcacagaagagctgaacagacattcaccaggatacgactgttggacaagctgctggagatggacctgctacccctcagcagcctccccaccacaagacaagtgatctcaatgtccccaaacctgtgggaccct

SEQ ID NO: 638 - DNA, 386 bp, Homo sapiens
tttcaaagttaaaacacagttttatttactcatttataaatactgttgtgtttacaggcatcatatagaagtgaatattattattcccaaactttcaaacacagaatactcaaaactatataacaacaaccagtaaaacaaaaccattcatcttagggttgaaaggccactcaaaattgcataaaaatacattcagttcacaaagcaagtctggctgcttctccctaaacaaccccaaccccaccccatcccaggtgtatttacagtggactgaagttaatccatacaactcagctgaaaaacagttacatctggtgtgtgaaccttggtggaactagggtgaagggtggagtaaagacacaaaatgctaccactaaaatgggaga

SEQ ID NO: 639 - DNA, 471 bp, Homo sapiens
ttttttatttttttttttttttttttacttgaagtagattgtctgaataggcatcctcatctatatttacccaaaacctcgcttactgtcatgtgcactacaaattgcaatttggaaacctactgtattgaaattctgtcagtttatggttcttgaagactgatgtcctttcccaaacactggttactgcagcagcatttttaatgtgtaagtgaagaaaaaaggccactaaggccaaagattttttaagaatcattgtacaaatcattatgttaaactatctaagctttgctgtaatactgttttctcttcaatatgtgatggtacaggaaggatgttaaatgaaggggtggtattgcaggagagcattttaaatggcagaagtaaaaagttataatatttataattttgatgggtttaagtttatttttgtagggaagatttttctcccctaaaatagtttctagaatg

SEQ ID NO: 640 - DNA, 470 bp, Homo sapiens
tttttttttttttttgagaaatcttgcacaaatggcattttattaaagaaaatctaatttacaaagctttgtaaattttaagaaaaacattcatagatcataaacaaaaatttcaatatgcaatattcaaatttacaagaaaataagcacaaacttttagacagtgcagttattgctgcactcctttaattccttatccagagcccaaaaaatgtagacaaaccctaaaaatgtagcagaagcatttccgcacactggtgtccagaatctagtttgtgcagaaatgtttccactagatttatagagtactcttcagaagaaagaggcgagggctcgtcatttggtcaccctttggacattttgcaactcttcaatgggtttccattgttggttgattgttataagcttttgaggtacagtagggtccacagtttcccaaggttctggatttttttttcgatcaaggatca

SEQ ID NO: 641 - DNA, 311 bp, Homo sapiens
tttctccagggagttttatttcctcagcagctgtttctcccatgcctgggcttgtgctaatgtggggcctgggcggacgtggggtcgggtgggcatctccctcagactgggcaacctcaggtgccccagccgagttcctgcagcccgctttggccccaggcagtcctggagagggtctggctgttttctttgcctgctggtgacgtgatagcagcccctgcctcatggcctgcatgtgggccggctgggctgtgctgaggcaggttctagaacagtgatctgatagcatccaaggcagaccatgtgggtga

SEQ ID NO: 642 - DNA, 394 bp, Homo sapiens
attttggcattttgatcactttaatcacagcaattccaaagttttaaattggacagtaaatgtgtattttctgtgcaatgtgtatatttgtattagcattatctacttaaactaagtttggtatatcaagtaagaaaaatattattttggtgtttttttttaatttcttatagtcaaaggtatgtttctgccttttacataatgtgacaaaggaatatgttggtcaaggcaatggctgtttcagtgtttcagctttaacaagaatgctggattacaggtcctcactttctaccaaggcagtattcagtgtcaggtgagatgggttggcctcaggttggaacgctgctttgatgtctagtccctggtccgaaagtgctgcatagcgactggctga

SEQ ID NO: 643 - DNA, 308 bp, Homo sapiens
ttttttcagataaaatattataggtttatttaaaacttaattctcaccttgagtatgcaaaatacaaactccacaaaatgttcattttactttgtagtttacaaatatacaaaatagacgtttgcttaaatttatattacatatttattaaggcaaggaactatatagaaaaacacatttgttctgcttaaggcatacttgggaataaaccattgtacaaattattgcacatctgaaaccacagtgcataacagactgtctgcataaaaatgctaaagaagtaaaccaggtatattacctgacttagg

SEQ ID NO: 644 - DNA, 5654 bp, Homo sapiens
gctttgtttgatggtgatccacatttatccacagagaatcctgccttggttcctgatgctttgctagcctcagacacttgtctggatataagcgaagctgcctttgaccacagtttcagcgatgcctcaggtctcaacacatccacgggaacaatagatgacatgagtaaactgacattatccgaaggccatccggaaacgccagttgatggggacctagggaagcaagatatctgctcatctgaagcctcgtggggtgattttgaatatgatgtaatgggccagaatatcgatgaagatttactgagagagcctgaacacttcctgtatggtggtgaccctcctttggaggaagattctctgaagcagtcgctggcaccgtacacacctccctttgatttgtcttatctcacagaacctgcccagagtgctgaaacaatagaggaagctgggtctccagaggatgaatctctgggatgcagagcagcagagatagtgctttctgcacttcctgatcgaagaagtgagggaaaccaggctgagaccaaaaacagactgcctggatcccagctggctgtgctgcatattcgtgaagaccctgagtccgtttatttgccggtaggagcaggctccaacattttgtctccatcaaacgttgactgggaagtagaaacagataattctgatttaccagcaggtggagacataggaccaccaaatggtgccagcaaggaaataccagaattggaagaagaaaaaacaattcctaccaaagagcctgagcagataaaatcagaatacaaggaagaaagatgcacagagaagaatgaagatcgtcatgcactacacatggattacatacttgtaaaccgtgaagaaaattcacactcaaagccagagacctgtgaagaaagagaaagcatagctgaattagaattgtatgtaggttccaaagaaacagggctgcagggaactcagttagcaagcttcccagacacatgtcagccagcctccttaaatgaaagaaaaggtctctctgcagagaaaatgtcttctaaaggcgatacgagatcatcttttgaaagccctgcacaagaccagagttggatgttcttgggccatagtgaggttggtgatccatcactggatgccagggactcagggcctgggtggtctggcaagactgtggagccgttctctgaactcggcttgggtgagggtccccagctgcagattctggaagaaatgaagcctctagaatctttagcactagaggaagcctctggtccagtcagccaatcacagaagagtaagagccgaggcagggctggcccggatgcagttacccatgacagtgaatgggaaatgctttcaccacagcctgttcagaaaaacatgatctctgacacggaaatggaggaggagacagagttccttgagctcggaaccaggatatcaagaccaaatggactactgtcagaggatgtaggaatggacatcccctttgaagagggcgtgctgagtcccagtgctgcagacatgaggcctgaacctcctaattctctggatcttaatgacactcatcctcggagaatcaagctcacagccccaaatatcaatctttctctggaccaaagtgaaggatctattctctctgatgataacttggacagtccagatgaaattgacatcaatgtggatgaacttgatacccccgatgaagcagattcttttgagtacactggccatgatcccacagccaacaaagattctggccaagagtcagagtctattccagaatatacggccgaagaggaacgggaggacaaccggctttggaggacagtggtcattggagaacaagagcagcgcattgacatgaaggtcatcgagccctacaggagagtcatttctcacggaggatactatggggacggtctaaatgccatcattgtgtttgccgcctgttttctgccagacagcagtcgggcggattaccactatgtcatggaaaatcttttcctatatgtaataagtactttagagttgatggtagctgaagactatatgattgtgtacttgaatggtgcaacccccaagaaggaggatgccagggctaggctggatgaagaaatgctaccagatgattgacagacggttgaggaagaatttgaaatcattcatcattgttcatccatcttggttcatcagaacaatccttgctgtgacacgaccttttataagttcaaaattcagcagtaaaattaaatatgtcaatagcttatcagaactcagtgggctgatcccaatggattgcatccacattccagagagcatcatcaaactggatgaagaactgagggaagcatcagaggcagctaaaactagctgcctttacaatgatccagaaatgtcttctatggagaaggatattgacttgaagctgaaagaaaagccttagttggccatgctggaagaagaggatgcttttctggttcatggttctgttgaaacatatctacctgaaagagacagggctgatgttacctttttccactttgcactacctggtgccattctaaatttctaaggggaaaaatagaaagtttgtttactcttaagatattttatgaaattgtgtgtactttcctattttgccaattatgtgcctcaaagattttagttgagccttagcaagaaagtaggaccttccatttcaatacttcattaacacggtgtagtgatactttgtcccttagactggtgtttaccagtaagatacctttaatccactgttaagtatgagtggatttgtttccatagattagctggatttccttttggtgattgcattaggtttaaagtacacaggtctcaactctccccaggaaagtttcccctgtttgactccacctttaaaatcctaagcctgactaggacagccacaaaccacacaaggtgtaaaaccatcatcagctaagtgcccgttttgttcttgtttaccagaatctcctttaacttctcaaagggaagccgggctttctaatccacgtcaactttattttagttgtcaaattgggcattatattttatgtaaattggtcttttaacatcattttcctgatgaatgttggtgaccaccacattgtgaaatttaagaatccgtgttgcatgtttggtagctctctgagtttcaggccataaactcagctccagaggttaccttttaagtgccaagaactcaagtgcaaggtggcctactcaaaaatcatttggtagcattcagttattcatgaattcctctctcgcatgcattataaaaagtgatctgctttaaaacaccgtaatctgatcataggcttaaaattaaatatgagtattactttcatgtacaaaatatttcctttatagtcttcatatgccctttaaaatgccaacaagatttcaagtctgtaggcctctagtgaggtggggtggcaaaccacagctaagtctcgctcaccactgcaagctaagaatggtttttacattttgggttggaaaaattttttttgaatatttcatgacacatgaaaattattcaaatgttagtgccgataaataaagtggtactgaaacacagccacacaaacttgtttttgtactgtctacagctactttcacactacagccgcagagctgagcagttcagcagaccgtatgtcccacaatgcctaaaacattgactatgtttacagaaaaagtttgctgacccctgctctagcaaacgcatcctttcctactccaccccaatttgtatttagatagtttctctaacagaacggacaaatgaggctgcaaactaatttatttttgtcaaaaatcaatgttttgacatccacagacagtgaaataaaagaaatggcttgctgaaaaacatgaggagtcctagccacaaaatcactgcttaggttgcaattgccaaaatgaagccttcttagaagcacttctttagtatatacaggtgttggctgaagtccgtgcctcactctgggaaccattcttagtctccagtgtctcctattacaaagaagctggcagaaataaaaatgaaggggtgagagcggttccaccctagtctcatggtggaaaattcattggggagagctgtccaggatatttggagtcctgggtagaaggagcttgtaactactttaaagtcgacatctttgcacaggtgattgagtttctctgacctcattgcttcacctctgtctcctcccgtccttccgcacgtgcccacacacacgcagttcagccctctttcctccataagcctccatcgttttctcttttctcctcttgatcctttcaagcgagtatcttgttgaattgtatgttctgttggatctcctccttcataacatctggcttgttggacagaaaaaccctacagcccaccccctcccacagcccacctccacttttgaaagcccaaattacacctctcccagaacacagtgttgacgtaaatacagttacccaatattcctgtttgttcacctatttgctactttcactcagtagcatcccattttgtaaaatgaattccatggtcaccctgtcacaggaagtaatgaaaaatccagtgttcagtgtagtggtgcaaacctgagggcatagagctgttcatagagggctcttgttatagccaaacagacacagcaacaatctcaccatttatatatatatttttaacttgtccagctcatctatggaaaactactcaggtggtatgctgtttgaagcctcatcttcctacatgaaaattatgggcatttgtcccaatgattttgtttcagctgttctgtaggctgcataaccactctgatatttaggtatctgctattttattatcttaaaagacaaattaatttaattgcatgtgctagggaaaagctaccatgtacattcaccccaagtaaatagaatcctagatgaatcctagaaaaataatccctaagcagataggtagacagaggtaaacattcacatgatttagctctctagctcttgcactctgaacattcttgctttggttctgacttctgggaactgctttgcatttctcctatagatctgtagttaagggaaccaaggggtcattggggcaaaagcattgtttctcaaagctccttgattaagagaaagaacagaaatttgcacagaagatagtgtcaaggagtgagaaagtttgtttgagggcagtagctcagtgtggaagaaaatcctgaagtttctgttgaagccatacaatgttctatggggttactctctaagacattctctgaggtgtgtgaggaagtcactactcctagcctttgttaagatgtaattttaaatattcagttatggtactatgtttgcaactctcgtcttatcacaatgcctcagtagtttgttcccttagaaacatttagatgtgcacaaattaatcttttatatatctaaaggtttttctatcatgcattggattgctcagaataaagtgtctgttagacttcgttttggtaaataaattctccataatgtagattaataatataaaagtctttaatgacacaatatatctatatagcctcactgtataattcagaaataaaaattgattctgc

SEQ ID NO: 645 - DNA, 1113 bp, Homo sapiens
atctcccactcctgcagctcttctcacaggaccagccactagcgcagcctcgagcgatggcctatgtccccgcaccgggctaccagcccacctacaacccgacgctgccttactaccagcccatcccgggcgggctcaacgtgggaatgtctgtttacatccaaggagtggccagcgagcacatgaagcggttcttcgtgaactttgtggttgggcaggatccgggctcagacgtcgccttccacttcaatccgcggtttgacggctgggacaaggtggtcttcaacacgttgcagggcgggaagtggggcagcgaggagaggaagaggagcatgcccttcaaaaagggtgccgcctttgagctggtcttcatagtcctggctgagcactacaaggtggtggtaaatggaaatcccttctatgagtacgggcaccggcttcccctacagatggtcacccacctgcaagtggatggggatctgcaacttcaatcaatcaacttcatcggaggccagcccctccggccccagggacccccgatgatgccaccttaccctggtcccggacattgccatcaacagctgaacagcctgcccaccatggaaggacccccaaccttcaacccgcctgtgccatatttcgggaggctgcaaggagggctcacagctcgaagaaccatcatcatcaagggctatgtgcctcccacaggcaagagctttgctatcaacttcaaggtgggctcctcaggggacatagctctgcacattaatccccgcatgggcaacggtaccgtggtccggaacagccttctgaatggctcgtggggatccgaggagaagaagatcacccacaacccatttggtcccggacagttctttgatctgtccattcgctgtggcttggatcgcttcaaggtttacgccaatggccagcacctctttgactttgcccatcgcctctcggccttccagagggtggacacattggaaatccagggtgatgtcaccttgtcctatgtccagatctaatctattcctggggccataactcatgggaaaacagaattatcccctaggactcctttctaagcccctaataaaatgtctgagggtg

SEQ ID NO: 646 - DNA, 145831 bp, Homo sapiens
aagctttaagtgcagagcaagaaggaattgaaccttttattatgattccttgagcacctaactaggtgctagactaatgattacaacctgctaacacagaggagtgatttttgtttttaaattgagttaacttaatatatcaaaaaaagaaatctgtttctggcattgctcgaaaaagcagaggacctgacactgcagaatgcagagtgcgagtagcagtccctgtgagatgggctttttgctctgcttttccgcagacctcaccactccctgtcgtctcccaggccatggtaaccattgaccgtggcacctcttttgttcactcacacacgccctgcttcactcatgccttacctgctttgtctctgtagacagtgggaccctccaccctataccaaacctctggggttgggaaaatcatgatccagagccaaggtggatgggcccccctgctcattggaactccaagcccaagtccctgaaccatgaaccccaaaggacatttttccagttctggttctgcttctggaatgcccagggggtcaggagaagccctccttccaaactttagcaggtgacaatttttccgccttagagacctggcccagcaatcttagcctactctggaagcagtgtccacccggggacacaaggaacaagcagattgtgaacagaggcctcctgggtgccagccactgcactggtccctagagggtagaaagacactgtaactggaagctgccctttgtcaagccccaagcattagcccttctgatctttttttttttttaacatggagtctcgctctgtcacgcaggctggagagcagtggtgtgatcctggctcactgcaacctccatttcctgagttcaagcgattcttgtgcctcagcctcccagtagctgggattacaggcacatgccaccacgcccagctaatttttgtatttttagtagagaagtggtttcaccatgttggccaggttggtcttgaactcctgaactcagatgatcctcccacctccgcctcccaacgtgctgggattacaggcatgagccactgcacccagccttctgatctttcaagtcattattgcttcaaagaacctcctccagtaatacaaggataatctatgcaaagacctcaggagaatatttaaaaataagtatgtatcacaaaaagcagccctcttccctggaggcaaacatgattcacaggttcatgtatgtacacacacacacacacacacacacacacacacaccccaaacataagaaaaagtcactccttgtatgttttgcagtatgattttttttccacttaaccctaccttatagttttttctgtctgttcataactatctagtcagacttcaaatatgtttttgaataggtaagacatgcaaatatgaaataaaatagtgtataagggaatatagaacttcccccttcgttcctatttctcgcccttccagttccccttcttagagacactgtggttgctggttacatatgtagccctccagtcatgttatttatttatttatattatttttcgagatggagtctcactctctcacccagactggagtgaagtggcatgatcttggctcactgcaacagccccctcccaggttcaagcaattctcctccctcagcctcccaagtagctgagactacaggcgtgtactaccacacccagctgatttttgtatttttagtagagagggggttttgccatgttggccaggctggtctcgatctcctgacctcaggtgatccacctgcctcggcctgccaaggtgctgggattacaggcttaagccactgtgcccagcctattgctttttttgtgataaagtctcactctgtcacccaggctggagtgcaatggtgcgatctcggctcctgcaacctatgccttctggattcaagcgatcatcccgccccagcctcctgagtagctgggattacaggtgtgcatcaccacacccagataatttttgtattttttgtaaagatgggtttttgccatgttagccaggctggtcttgaactcctgacctcaagtgatccacccacctcagcctcccaaagtgctacaattacaggtgtgagctgctccatccagcctccagtgatgttttatacacatgcagccacatagagagcccctcctgcacccctccaaaatggcagcacaggccccggctgttgtgcgtctcaatctttgcatctaactgtgtattttggccattcatccatggtagtagagagagggccactgcacagtcttctgctatagggatgaaccataatgattaagcctgtctgctattgacaggtatttaggttgtttctagtctttttgctcttaaaagcaaggctgcagcaaaagcacgtgcttggtggaccacgtctgtctctaggttgggtatttagaaagccgtgatattgcactgcagcttcataaagaagccgtgattatccatcactttactgaggaagctcaggggtaggtctgtatgcacaagtcaggcaggtgataaggcaaagccaacactctgcccaggcctgtgtgtctttttttttttgagaccaagtctcgctgtatcacccaggctggagtggagtggcacaatctcagctcactgcaacctctgccacctgagttcaagcagttctcctgcctcagcttcccgagtagctgggattacaggcacgcgccaccacaccttgctaatttttgtatttttagtagagatgaggtttcactgtgttggccgggctggtctcgaactcttgacctcaggtgatccacccaccttggcctcccaaagtgccgggattacaggtgtgagccactgcgcccggccatccctgtgtgtctgaaagccagtgttccttccacttccctcccttccctccctgttcctcatttctgctgcaggccccgggagcaccccctgctcagggctctgtggctgaccatataaagcgtcagagaaaaactggagctgcttcctaatacggtcacaagagggaaatcctgggcctgcagctgggacttgctggtggcacagggcccatgagatgccggctgggacacaggaggctgggatgttgaaacctctgaatttaaccagctggagaggggctcgtggggccagagaggcagaaacacagccaactatggttgggctgggtcgaggtgaaggagaagtggctgaataatgtgggaggaagagcccgatgctgaagccccacgaccctgccgtgagatgtgcggctgcctgcaccagtcttaccttcactccatcgtcataccctggcttgcttagaaagcttttacagaactcagcagagattcagatctacctggaagtatggattaagtgcttgttgtgtgcacggcactgggagagatgtcccaaacaaagaggatggaagtcatattcctctttcagaagctagtgatggagttgaaaaggcagtgtggtccttccttctttttaaaaattcattttattctttttttttttttctttgagacagtctcactttgtcacccaggctggagtgtggtggcatgatctcggctcacataacctctgcctccttggttcaggtgactctcctgcctcagactcctgagtagctgggattacaggcatgcgccaccacacccagctaatttttgtatttttagtaaagacggggttttgccatgttagccaggctgttctcaaactcctgacctcaagtgatctgacctcctcgatttcccaaagtgctggcattaaaggtgtgagccaccatgcccggcctcttccttctttttaaaaattccttttattcttttcttttctctatctctcatctctctttcttcctttctttcttactttccttccttccttccttcttttttttttttttttagagtctcactctgttgcccaggctggagtgcagcaccatgatctcagctcactataacctccacctcctgggttcaagtgattctcctacctcggcctcccgactagctgggattacaggcgcctgccatcatgcctggctaatttttgtatttttagtagagacggggttttgccatgttggccaggctggtctcgaactcctgacctcaagtgatctgacctccttggccacccgaagtgctgggattacagctgactgagtgtctaccctgtccctggcactgtgcggggtgcaggagatacagtagtgtgtgggtcacagtccaggaggtaacatttaggcagagctctaaaagaggagagggaaccagctgtgggaagatgaggggaaaagtgttccaagtggagagaacagcatattgaaggctctaaggtggcaagacttccctctcgtgaaatgaagggagcatagtaagagtcactaaataacattgattgagcacctactacataccagccgccatgctaaatgcttttcgagcattatctcgcagcacatctatgaagggcttgttcgtatgcctccctgttttgtagatgaggataagtgagactcagagaggttaagggacttgcccagggtcacacagcgaagaagtagcaaagtgaaggttcaaattcaagtaccccatacccagttctgagcccttagccactgccctttactgcctccaggtcaagggcttgagtgaggacaggttgggctgtaaatgatacctacattcaaaaggggcgtggcagtggacatggccccagaggagctggagatggagtcgaggcctgaaggagggtggggcttgattgacctttgttcaggtgaccacagactgggctcttctctttgggaggcttgtcctggggacaggggacactgattgaacaggaaatagcccctggcctggctcagtgtagtccactgagtacctactgccgccgtgcaaggcccccaggtcacggaggtgaagtcaggctgtccctgctcccaggaagctgtatcattaatttattcccctggcatgcatttagcaagcatttagttagcacctattctataccaaggcctgtgctgggactgaagaggagaaagggggttccccggactcaaggcacttgcagctggtgtttgcaggatgggtgggagggtcctgggtgatggaatggggaagaggggtgtccaggcaggcagccccccactcccagccccaccaggctggatgttgctcctgggccccgcttacctctaacccttgctttgcttctccatttcggtccgatggagccgcttataccaagctgcttatagttcacccccacggaccccgtgtcctgtttttctgcccatgtccctgctttgtcttgagctggttaacaccttgttgtcctttaagactcagtgcagggaatacctccccacctggaggtttccctgaccacccccaatgtgggttagggccttcccttccttgttcctatcattctctgttcttacgacgtgttttaatgtacttgtctccccctctgatttaagttctttaagggcaggagctatcattgatttctttatctccagcctctgacacagatgtggtatatagtaggtgctcagtaaatggttgatggctatttagacaggcatatgttgactcattcattctccttttaggggatggtgagaacctccgtctccatcaatcctgtttccttttttttttttttttttttttttttgagatgggttctccctctgtcacccaggctggagtgcaatggcaccaccttggctcactacaacctccctccacctcccaggttcaagtgattctcctgcctcagcctgccgagtagctgggactacaggcatgtgccaccatgccctgctaattttttgtatttttggtagaaacagggtctcactgtgttgcctaggttggtcttgaactcctgagtgtgagcaatctgccctccttggtctcccaaagtactgggatcataggtgtgaaccactgcgcccaacaatcctgtaccttcaaagaatattcctctgcagcacccccagacattacataccattgtccctgagtggactgagccctggaaggaccttcccactctctctttttctttctttttcttttttgagacaaggtctcaccgtgtcacacaggctggagtgcatggcacaatcacggcttactgcaacctcaacctcccaggcttaagcaaacctcccacctcagcctcccaagtggctgggactacaggtgaatgccaccatgcccagctaatttttaaatttcttatagagatgggggtctcactgtgctgcccaagctggtctcagacttctgggctcaagcaatcttcctgccttgacctcccaaagtgctgggattacagttgtgagccaccacacccagccagactttcccactctctaattggctccagcccttgactaaaaggcccttgagggctgggatcctgtgtttttttaatgttctaatgtagtcccagcaccttttgcatggcatctgggacgtacagaatgaatgaatgaatgaatgaatgaatgaatgaatgaacgaacgatcagtagtttctgtttctgttggatgggcctaggctggatagcataatggaccatgctcatacctgggggcgggccaggctgggcttggtgctgccaggatcttctttggtgacctcggtcaagtcacttaaccctctgttgcttggttcaccctagctgtaactgagagatggatctgtggttctccctaagtcacttgcagggaagaggatacgctttatggccatcagagtcttgggcagtactgatgtttatcgtttggggaaagcagttcctgtgagacgggttggagcctgtctcctgaactgtgacctcaaccatgggaaaatctagtatccagtaaggaaaaatcatgacaatagtgccttaccacgtacagcatggcgggactcgccttgtgccttgactcctccgtccctgatctgattattttcagatgctcctattcacccagtaggagaggactgctattttttaaatggtaaagtgcatatgacataaaatttaccattttaaacattttaaagaaaacagtgccattaagtgcattcacaatgttgtacagctatcaatttcaagacagggtcttgctctgtcacccaggggctagagtgcaatggtacaatcatagctcactattaccttgagctcctgggatcaagcaatcctcctgactcagcctcccaagtagctgggactacaggtgatcaccaccatggccagctattttttttttttttttttttttgtagagagggggtccggctgttgttgcctgagctggtctcaaacacttagcctgaagcaatcctcccaccttggcctcccaaagtgctgggattacaggcatgagccactacacttggccccagagcatttttatagcctcaaaaggaaaccttatacccatgagcagttcctcctcatttcccacctctttccagcctctgggaaccacaagtctgttttctgtctccatggctttgcctactctagacacttcacataaatgagatgatagagtacgtgacttttcgtgcctggcttctttcactaggcatattttcaagcttcatccacattggagagctcatgtcagtgttggtctctgttttgcagatggggaaggtattaatgatcaggagcaggcgctgtggggtaaacaggagttctagttcccaacttccctccagctgtgtaacctggtgacaacctcaccatgcctcactttgccctcctgtcaaacaggcggtggggaaatcactgttactgagtagttgtgaagatgccacgaggagatgcctctgccatcttctagagactgagtcactggggtttcttcttagatatggacattgggaggtcccagaaagagatcagagggtggtgggaggagagagagcttggaggattattaccttttcctccctccctcctggaccacagttttggcagctgtgtttctgtatgactgcggatccctctggacagcccctttttaggggtgtgtggctttctatgcctccaatgttcagttaacgacattccctctctggctgagtgcggtggttcccacctgtaatcccagcactttgggaggctgagactggcgcatcacctcagctcaggagttcgagaccagcctgggcaatatggtgaaaccctgtctctacaaaaaacaaaataaaaattacctgggcatggttgtgcacacctgtggtaccacctacttgggaggctgaggcgagaggatcacttaagcccagaaactcaaggttgtagtgagccaagatcaccccactacactgcagcctgggcgacagagcaagaccctgtctcaaaaaaaaaaaaaagtaaacaacattctcttctgttcttgctcttcagacttaactgctcccgtcactggttgggtttctttaattctgcacacatatctgtaaacactttctttattaaatgttcctgagttaatatcttaagcacactgttcattttctgtgccacctgttaaatgatgagcatttaatatgattgtcagcatccaaaaaagatcctgcgtagtgcttagttcggtgcccaacacatagtaagtgctcaatgaacggtggctgttatttaagccagtgaggtccggggaggtaaagtggcaggtcggaggagtggagctgagatttgaacccagagctcttcaaaactccacagtttggccaggtgcaatggctcacaactataatcccagtgctttgggaggctgaaatgagagaattgcttgagcccaggaatttgagaccagcctgagcaacacagtgaaacccatgtctctacagaaaatataaacatcagccaggcctggtggcgcccgcctgtagtcctggctactcaggaggctgaggtaggaggatcacctgagtccagaaaggtcaaggtttcagtgagtcacgttcacaccaccgcactccagcctaggtgacagagtgagaccccatctcaaaacaaacacaaaaccccccacagttgcaaaataaaacataggcagcttggaaacccactctcgccctttctcctcttcccacgtacctggaatatcagtgaggcccagggtttccactaagactccaagctccagtttccccatctctaacatgagaatattgagtgcttctgtgcaatctgtctaccctggaggaggtctggaagtaagctgggttctctgtctgcagacgtactctggcctcttctgcgtggtggtcaacccctataaacacctgcccatctactcggagaagatcgtcgacatgtacaagggcaagaagaggcacgagatgccgcctcacatctacgccatcgcagacacggcctaccggagcatgcttcaaggtgagtgaactcagggctgcacggggccagctccagggagcccctcctgtcctgcttgtctgcagttcttgccaggaatgtggagtttggcaggcactgcgagggaccaggagttactgtggctgaaaaagggaaaaagcaaaaggaacatctgtgtttgcagcctgggagggtgagggagagccaagagcttgggcaaatacgggcatgggcccgctccagctccagctccggggctcgctgcccaaggtccccgtcgggccagctgtctgcaaaggatggaaagagggtggggaacagccctggggctgagccattgtggtctgtgttgacacctacctgtccctcaacccctgtgggactgtgggtaaatatcttttcctcttcagcctcagtttcctcatttgtcaaaaggggtgatagtctctatcttgtagcttcttgtgaagattgttaatgctggtttttccaaacttaagacttgtgcctattactttcatgtttatacgttattatttttactattgttttattatttttgagacagggtctcactttctcgcccaggctgaagtgcagtggtgccatctcggctccctgcaacctccgcctcctgggctcaagcaattctcctgcctcagcctcccaagtagctgggactataggtgtggactgtcatgtcaagctaattttaaaaaggtgggtttttttgttttgtttttgttttgttttgttttgtttttggaagtgacaggatcttgctatactggttggtctcaaactcttggcctcaggcgatcctcccactttggcctcccaaagttctgggattataggcatgagccactgcacccaggccttctcaccttctatttagaacactttggagcccctgaaatagccacccccaagtcaaacagagggactaggcagttaatgcaaacaagtgtaccaggtcaggcgaagagtacaagaaactcgaaaactcacaccccctctgaaagggcaccaacaggtgggaacccagggatctgagttgggagttgagaggagcccaattctggaagttcttgaggccggaatccaggtgtgcctgagagatgccacgaccccgcccccaagatagagggactcaggtataagtgccccaactttctgacagtgagccagactccacaggtaggaccagaatcttggcccttctaggcagggcctgccattacctccaaagaccagcaggtggagccttgcaaaggcaatcttggagctgtaatctcaggttgtaaagtgatggctcctggagtcaggtatctgtcttttttttttttttgagacggagtctcgctctgtcgcccaggccggactgcggactgcagtggcgcaatctcggctcactgcaagctccgcttcccgggttcacgccattctcctgcctcagcctcccgagtagctgggactacaggcgcccgccaccgcgcccggctaattttttgtatttttagtagagacggggtttcaccttgttagccaggatggtctcgatctcctgacctcatgatccacccgcctcggcctcccaaagtgctgggattacaggcataagccaccatacccagcaattcctggttcttttctggagctgaggtcccactaagcacattttaatctaaataccaaaaagaaagaaaattctgttagcaaaggagaaggagggggagcgacagatgggtaagcatttctacagtgctctgaaaaaatttatttgtaacttgaaaaagtctttaatattgtatattcattctagaaaaacttaaacatatatttaagtaaaagagaacttgctggcacctatgattctatcatccaaaactcatcaccattaacattttgttacgtgacctttcattacactaactgaactaaatggcatgaaatgaaggaaatttttactatctgaagataattcgttccagaaaaagatcacttaaaacagagaccaaagtttcactgtagatagtatgtgtgtggaggagggaaagagagtgggcaaaatatttgactgagcttgaaaaatgacattgcaggccaggcacagtggctcacgcctgtaatcctggcactttgggaagcccagatgggtggattgctcgaggtcatgagttcgagaccagcctgggcaatatggcgaaaccctgtctctacaaaaaatacaaaaattactttggtgtggtagcacatacctgtagtcccacttcttgggaggctgaggtgggaggatcgcttgagaccaggaagtggaggttgcagtgagccgagatcacgccactgcattccagcctgggtgagagagccagaccttgtctcaaaagaaaagaaaagaaaaccaacattgcaaattataaaaataggttaatttcagcttacatgtaataagaattttattttaattacaagtaggtgctaatttgtagattcagtataaaatgaattaagagtgggtgtggggtttttttctgtaactttttctgggctgagggatgaaatcatgtgagcataaaacgacatcttcatgtcatgcttgacttctgcagcccgagctaaaaaggatcattcttacagatttatttgatgggtcaccagttttcctaagggcttcttttacttctttagtgtttaagtctctcaaagcccctgtggtcttagcgttcattcagctgtgaattgccctgaatctttttctttcttttgtctttctttctttctttttttttttttttttccggatggagtttccctcttggtgcccaggttggagtgcaatggtgtgatctcagctcactgcaacctccacctcctgggttcaagcgattctactgcctcagcctcccaagtaactgggattataggcatgtgccaccacacccggctaattttgtatttttagtagagatggggtttcaccatgttacccaggatggtctcgatctcctgacattgtgatctgcccgcctcagcctcccatagtgctgggattacaggcatgcaccatcacaccaggctaattttgtatttttagtagagatggggctttaccatgttggtcagactggtcttgaactcctggcctcaggtgatcctcccacctcggcctcccaaagtggtgggattacaggtgtgcaccaccacacttggcccctgaatcttttttttggcctttccaaggccactgactttgccagtcactgcaccttgttttccagaactgccactttgttttgtgttcatatcatgatggtggctattgatacccaataattggcaaggtgaagccactgaatcgtcggagaaggaggtttcggtggagtttgatcgctcttgtagtcattgaagaatacttttgtgttgtggggacttttgctttcctagaccagcagtccccaacctttttgacaccagggaccagtttcatagaagtcagtttttccatggaccgcaggggagagatggttcgggatgattcgagcgcattacatttattgtgcactttatttctatgattacattgtcatatataatgaaatcattatacaactcaccatcatgtagaatcagtgggagccctgagcttgttttcctgcaactagacggtcccatctgggggtgatgggagacagtgacagatcatcaggcattagattctcataaggagcacacagcctggatccctcttatgtgcagttcacagtagggttggtggttctataagagtctaatgccgcctctgatctgagaggaagcagagctcaggcagtaattggagtgatagggagtggctgtaaatacagatgaagcccactactcacctcctgctgtgcagtaccagtcggtggtttgagatgcctgcgctagaccacctcttaactgtgaggcaatgttgtaattgacaaggacaccctgtgttcatatatttgattcctcatggtctctaggttttaacacaaaattgcatagtcagctctcttgaaactacttagaaatgctcacttgacacatagtaagctccaataggaaatgactatcatgattgagcacagcagcatgtcttcagtcctagcactttgggaggccaaggcaggaggatcacttgaggccaggagttagagaccagcctggccaacatagtgagctcttgtctctacaaaaaaataattagctggccacagtgcgtgagtctgtagtcctagctactctggaggctgaggcaggaggatggcttgagcccaggacttcaagaatgcagtgtgctatgatcgtgctatggtactccagccttggcaacagagtaagaccctgtcacgaaagaaagaaagaaaatgaaaaccgtgaatatgcacatccataaaagataaactctttacttaatttaaatgttaaccaacacctgctatgccctcgtctattttggcatgacctggtgctttctggcaaatcattgatggcggactccaaaaataaaaagaatcgggcacggtggctaacgcctgtaatcccagcactttgggaggccaaggtggggggatcatgagatcaggagatcgagaccatcctggctaacgtggtgaatctccgtctctactaaaaatacaaaaaaaactagccaggcacagtggcaggcgcctgtagtcccagctactcagggggtgctgaggcaggagaatggtgtgaacccaagaggcggagcttgcagtgagccgagatcacgccactgcactctagcctgggcaacaaagcgagactccatctcaaaataaataaataaataaaaaataaaaagaatgtcaaaaataatggagaaaaatttaagcttgggaagaattccgttcacctgcttaattttttctccattcccaagtaggaaattggtttttgtgaagaaacacgtaggcccagtgtgttgactccattgataaatggcacgatctcattctgttaagtcactgggctgcgatccacactaagcttaccatgaaggtggagagagaaagctagcacatgtggcttcttccttgagttcttcatggaaaagatggggtgtgaaaaggcgggattgaggagggatgggtaacacacatgcactgaatataagatgaagcattgcagttgtgtcacatagacagtaagttcctgaggacctataaactccatccttcttgcatgtgcatcattgtatctccagcacattttctggtgcctggcacatagtagctgctcagtatttgttgaatcaatgaattattagagttatttatagaaaagaacctaccagggtcaggatggatggggtgggttatttgagagaggtggggctttataagcctcgaagaatggtttgctaaggtgagagaagggggcagggatggctttctagccaagaataataaaagcataaatgtaggggtgagaatgggtatgatgagtgtggcaggagctggtttagaggggttgactagtatactgtggcagggagctcagagccagagctcagccctttgctgcctcacaggagttgggaaaatgggagggactttctaagagatacttcacaacatggcaccctcccaagtggaagccaagccccttgagggtatgggaagagaagctgatatttaaaatatgtatcttatatctgcatatgcataaattatgtcatgtttattttttaaattctccccccctttttttttgaggcagagtctcgccctgccacccaggctggagtgcagcagcacgatctcagctcagtggtatgatttctgctcactgcaacctctgtctcctgggttcaagcaattcttgtgcctcagcctcctgagtagctgggactacaggcacacaccaccatgcctggctaatttttgtatttttagtagagatggggttttgccatgttggccaggctggtttcaaactcctgacctcaggtgatctgcccgcctcaacctcccaaagtgctgagattacaggcatgagccactgcgcccggccgtggtttgtttttggaaagatgttacatacaaattcaaaaggtgaacttctcccttcaacccttgtgcattagacccttagcttccctcccaagagacaattatggtttctagtgtatgaggttttctcctagagatatttttgcaagtataagcaaataggtatctattttcttccctaagatttccctacaaatactagcattccatatatatacagtcctatattttgccagaggatgttacatatcagtgcatgtaggaattccttgttcccttttttaaaaaattggtttttatttttgttaaaagtattcatgcagacggcttagagtcaagtaatttttgaaggcttattaagaaaaatagccatcctctgctacttctcaactcctttaattgattttttttttttttggtatttaccaccatatctctgaaaacaacacttgatcattgtgctgctatcttaattttgttttcaattttaggtatcatctattgactttcctccatgaaagatgaaatttagctcattcaccctctggatttgcccctatttcctcgttccaacacacatgcctcatatcagagtcccagtataattttatcttagttttgacaaactcagtgttcagagtttccattattatgactatgtaatgctatctagagtttacattattatgattatgtagatgttattcaaagctgagctttgcactgctttgtgactatttttcttctttctgtatgacttttctttttcctggagttagcaattgccttttttttccccaatcttgttttccatgtatttaaccaccaattctgccccaaaatctctttctaaatgtgttaatctccttttaatatgtccagacatgtattggatatcatattgatatcatctccttgaatgtgatctctactatagccttctgatctgccctggctttctctatagctagtaactgtcatataggatctttttcaccatccttgaaattccccttagtgctttcatagtggattccttgtttcccagttttcatgtcttcctctttcttgctttactctcctgcttaaatcaagcactttgtccagtagcttcccaagaaagaatgtacgtgatcttgaggcattgagaacttccatatctgagaggcttgatgcttctctaacacttaaaggatagtttagttgggtttaaaatttcaggcaagaaagttgttttcagaaagttataaataactttttttgcctgagctttttaaggcatttgtgttgttgccttctagtttcagttttgagaagatgaaacccaatctgattcgtatgtgtgtatgtttgtgagtgtgtgtgtgtgtgattatattcaccttcctggctgggaatattcttgatcctttgtacatgaccagtttttgtttttcctccttctctagaagcttttagactgtctttgtacccctattcaggatgatgggacttgctatgagtccatttttatttgttatcctggacacttagtggcccaattaatctataaacgtgtgtccacaaattctgggaaatgttgcaaattatttcattgatgctgtctttctccctgtgttctctgtttctttttcttagaagtctttttatttccataatggaattcctagaccaatcctataatttaaatctctttcttttgtcattttcatcactttaatgtttttaatggtattttctgggcacttacctcaacttttttccctaacccttccattgcgttttaaatttctggtatatattttattaaattccaaaaattctattttatttttaaatgtttctttcatatgacattctttttctgtggttgcaatatcctgtttctcagaggatatttaatgcagagtctatttcctccaagatacatattttcctaattgttttaacttctgtctgtcatattagtggatttcttcagatgtcttgggattcttggctatccattcatcttggatgctttagtacacaggataccaaattgttgatggaagctcagtgcttataggatgggcttgctgatgtgcttggctataatatgaaagcactgggctaccccattaggacacttctgtttcgtctttcagtcttttgttcatgggctaatctgattcttcagagaaggtttgtagaaaaatcttctgcctggaggttaaagatttgtctagcatcattttgagggtctagttgaaaagaagctgagggtttcaaaatgtgcagtgaaatttgtacattataccttccttctttcagtatggttcctggtgtccccccaggacggagaccctctgtttaaccctcaccagagactaaacccaccaccttctgtggggtgtgagaagggcagtcacttggcttcagggagtgtagaagatatgggaggggtctaacagtgccttatatttgacccagtccttatgtttttgtctcctccttgatcttttcttccagaggcccctggcattgccagtttctgaggtttggggcagaaatggggaattcggtgttgaaattaggtcgtttcccacctttcctcactgctcacctagacttttttcttggtacctttttttttttttttttttttttttttttttgagatggagtttcactctcgttgtccaggctggagtgcaatggcatgatcttggctcactgcaacctccacctcccgggttcaagtgattctcctgcctcagcctcccaagtagctgggattacaggcatccgccaccacacccggctaatttttgtattttaaatagagatggggttcaaccatgttggtcaggctggtcttgaactcccgaccttaggtgatccacccaactcggcctcccaaagtgctgggattacaggcgtgagccacggtgtctggactttttcttggtacttttcaacgcttatcccattttctgtcttccaagatggctttgctgttctcccctctctagttctttttaaactgcctcatgtatttttacactttttggtttgtttgtttttttttgggggatggagtttccctcttgtcgcgcaagctggagtgcacgatctctgctcactgcagcctccacctcccaggatcaagcgattctgcagcctcagcctcctgagtagctgggattacaggtgcatgccaccatgcccagctaatttctgtatttttagtagagacgggttggccaggctcgtctcgagctcctgacctcaggtgatccactcacctcagcctcccaaagtgctgggattacaggcgtgaaccaccacgcccggcctttttacacttttttttttttgccttttcccccctcttttgtgtggagaatggggtcttgttatattttccaggcaggtcttgaactcctgggctccagctttcctcatgcctgtgccttcctaagagctgggattccaggcatgagccaccatgcccggctaaactggttcatgtatttttggaaagtcttttacagttattttagtaaggtttaggaaggaagagagctaaatgcatgcactcagcctaccatcttctcatgggaattctctcatgccttcttttacaaagaagtgataataataatcatggatttttattatatgcttcctataaagctcagggctttacagaaatattctcagttaatctttaccacaaacctacaaggtggacaggaccagattaggaattttaaaattaagccctgaaactattaaggtgcaggcatatgtcataaaaaaaaattaaattataaagtaaagaaggctgacaaaattgtttttgtttttgctttttttagagacagggtcttgctctgttgcccaggctggagtgtaatggtgcgattgtaactcactgcagcctcaaactcctgggttcagcaatcctgcctcagcttcccaagtagctgagactacagagatgtaccaccatgctcagctaattaaaaaaaaacaactgttttttgtttgtttgttttgagacagagtttcacccctgtcacccaggctggagtgcaatggcacgatctcagctcactgcaacctccacctcctgggttcaagtgattctcctgcctcagcctcctgagtagctgggattacaggcacatgccaccatgcccagctaatttttgtacttttagtagagatggtgtttcaccgtgttgaccagactggtcttgaactcctgacctcaggtgatccacccaccttggccttccaaagtgctgggattacaggcatgagccaccgtgcccagtcttttttatttttgagacaggttctcactttgtcacccaggctagagtgcagtggcacaaacacggctcactgcaggcttgacctcctaggctccagtgatcttctcacctcagctccccaagtagctgggactgcagccatgcaccaccacacccggctaatttttgtattttttgtggagacgggatttcaccatgttgcccaggctggtcttgaactcctgagctcaagtgatccacctgcctaggcttctcaaagtgctgggattacaggtgtgagcccactgtgcctagtgaaaaaactttttttttttttttttttttttttttttttagagataagatcttactgtgttgcccaggctggtctctcattcctggcctcaagtgatcctcctgccttgacctcccaaagtgctgggattatgggtatgagccaccgtgcccagcctaaagttgctatttttcccatgatgtttatcttcgtggtgcttatgaaatggcaactatggcattcttccttctcgtgcatgcctgtgtgggtgtgccctcagcatatgcttacaaggtttattgggtgatccaacgctagccgcaagagctattattagctcccttttacagctgggaaaacagactcagaggagtggagaacttgctgcagatttgttaagtgtcagagccaaatatacacttggattatcctgactccaaagccggagccctgctggtcagtcggtgacaccgggcaaccacagggatccccctcaatcccacggaaggctgtctactgtcttcatctcagagtgttgacagctcaaagcttaggaggctggagctaagttcaataaatgaacgtgatgaataggagaaaagcgccattaaagccctccagacaagaaccactttggagcccctccatgggtccctggggtgtaggaggggcaggaaagcagataagattccattctgagcctctgcacttgccctatgcaagatagccacaagtaatgttttgtcctcacctcattagcaacaaatggccacactcaggggattaaaaaaagaaataacagccagcctttatcagcttggggctcttggctaattcctctttaagcttaagacaactctgcgggtggagtgatccaaacgactttctccactttgcaagttcccacactcggctgtatccttctgcttgagattggcagccccctggggatggttcctgctcacccaactcccctgaggctgctccccagtagaggcagagagaggaagggcactgatgtcctcagggcccctgcaataggtcaggacctgggttcactgctccatcaatcccacattgctcggccctcactagcaccacacagggtgggtggcagcctccccatttgatcaatggggaaaactcagcacacctacttggccccagaactgagagtcaaacctggggacccagcttcgctgccctcagaatgttactcttccctcctgggtagcgtggtatagatagtgtagtattcttgtccccatataacggaagaggaaactgaggcccccagaaggctaagggactagcataggccttgtgtcttagcctgttaaggctgctatatcaaaataccatagactgggtggcttttaaacagatatttgtttctcgtggttctggaggctgggaagtccaagatcaagcttggtatctggtgagggcctagtgctgccttctcgctgtgtctcacatggtggaagggacctgctagctctctgggtctctcccccaatgaggattgaacccccatgatctcatcacctcccaaaggccccacctcctaatatcatcactttaggggtaaggattccagcatatgaatttgagggagacatgagcattcagaccatgacaccttgtaatcagaaaggggttaaatatctttggttgaatatcctgtcctgccgattcagaatcactgctgtctataacctcttccctagatcactgttttagatgatgatgataaagatgatattaacggcaattaccaagctcttaaatgtgctgtgggtaaaacaattttaagctctttctgaatccagtctctttcaatcatcttcatgcccttgaaaggtctggatttttgtcgatttccctggtgaggaaacgggccctgggggcagaggtgatagggtggagccaagaagtaattcccagctgtttctctgcagaggcagtgctgctacaaacacatctccaggaaggggtacagccaaatgcttctctgtctcttgtgggttttgcagtggctgtcagctatgtgtctggcccggttgggaatgatgggggactgtgtgtgggaatgaatggctctgtctggctggctcagtctttacagaggtgctaggagtgtctgtttggtgctctgactaatcatgaaaagttcacgtttttatctttattttatttttatttttggtacccatggtgcattacagggaagggagacagcaaaggagaattatttgttataaaatagtaaatattggccaggcacagtggttcacacctgtaatctcagcactttgggaggcagaggcaggcagatcatctgaggtcaggagttcgagaccagcctggccaatgtagtgaaaccccatctctactaaaaatacaaaaaattagccaggcatggtggtgggcgactataatcccagctactcgggaggctgaggcaggagaatcgcttgaacctgggaggtagaggttgcagtgagccgagattgccccactgcactccagcctgggcaacaagagcaaaactccgtctcaaaaaaaaacaaaaacaaaaacaaaaaccgtaaatattaaattgaaaaagggacatacttaagggagtgaacctgaaaagccccagctgacacttggcaacaccttccttgtttgttttgggcttttttgagacagagtctcactctgttgcccaggctggagtgtagtggtgtgatctcggctcacctgagcctcagcctctccaggctcaggtgatcctcccacctcagcctccagagtagctgcatacaggcatgcaccagtacaactggctaatttttgtattttttgtagagatgaggttttgctatgttgttcaggctggccttgaactcctgagcccaagcaatccacctacctcggcctcccaaagtgctgggattataggcgtgacccacagtgcctggccagcaccttccttgttaaattgcatgtgtcagccacctccctcggtgtcctcccagcctctgggcagtctggctccccattcctttctttatccaacagcatttttttgtgagacaaggccttgccctgttgcccaggctggagtggagtggcacactcatagctcactccagcctccaactcctgggctcaagtgatcctcccctctcagcctcccaagtagctgggaccacaggcacagatcatcacgcctggctaattttttgattttttgtagagatgaggtctcattatgttgcccaggctggtctcgaactcctggcctcaagcaatcctcccgcctcggtctcccaaagtgctggaattacagatgtgatccaccacgcccggtcattctaacaatattgattattagatgttgccctagacacagcctactgtgcgtatgtgtaaatacgaattgaatcatcccacaagtagctgctaagtagaggaggtccagagagtggggaagtgtagccctggggaccttgggaggacaggggaggcttccttggaaggtgaagtgtaggcttggctagggaacttgatataggttctatgaggctgctggggctggagcagagagaagggggagaatgtaggaggtaggagtggaggcccaagagggagagcgttggttttcctgtctcctacaccccttcactggccagttctgctttcatgtttttatttattatatattttttgagacagagtttcactctttcacccaagctagagcgcagtggcacaataatagctccctgtaacctcgaactcctaggctcaagcaattttcctgcctcagccttccaaatagctggggctacaggcacacacctctgtccacagctaattaaaaaaaatttttttttcatagagataggggtctcgctttgagtctcaaactcctcgcctcaagcaatccttctgcctcagcctcccaaagcactgggattacaggcatgagctcctatgcccagcccagttctgcttttacaataccagggcttcctgtaggtttggaaaacacctgttgggttgcagcaaaggctctcaaagtatctcttcttactcagcatgtcatcctaaccaactctgccgggagagtagagtggggagatgaaggctggagaaagagaagggccctcacttacagaatggcttaggtcatgggctctggagctgggttcacctcccagctctgccccggctattactttgtgcctcagtttcctcacttgtcccgtgaggatgatgactgtgcttactccagttgttacaagggtgattcggtcagtgtgtagggacacggtgcatggacaggacaagttcaacaggcattagcagtcagctgccgaggacccaccgtcaagggccatgcagtggccaccttcacagtcacaccacagaagatccagaacctctggcatctgcctccgtgcggggcattaggtagagagccacttttctgcaggcaatggaggctgagacctttcttctttactagcccaggggtattgatggccctgcagagacgggttttgattacctctcactggatcccccagcagcctgttaccagaaagaagggcagacgcagggagcctgggtctgtgctcagtccccgctgggttttctccttttatggtcagcctacagtgctctggcttcccagacagaatccaccagcttgtgtttgggcttgggccgaaatagctggtctgtggggagctgggtacctcctgggagtcctcaggcccacagcgggggaggaaccgctgaagccctttatcttctcaggaaacgtgcctggggccttacacatccgaggctgggtggggagtctggggaggaggaagggagagaggcatgtttaaggatggggtgtgaggtgacatgagccccagggatctgggctgggaagctcagccccaggcgggtcctgatgatggccggccgcccccagctccagccttcccagactccacggaggctcggtactgtgtccccgcccactttggagcttctgtcccaggccctctgcttgggatgctctgcctcgacctctccccaggagattctttcacatttttcttaatgctgttcagtggtcacctctgccgtgaaggcttcctgtcttgctcaggtcagtgtgaaaaaacaaacaaacaaaaaacctgacgtctatagcacttgggttcacatccatcgtagcactgctcatctcttacggtcatttctttgcccatctgactcccaccctgggtcatgaacttctcaaaagcaaggataagcaagtcatgaagctcggtgcattggcttgagcctgtgatttcagttacttgggaggccaaggcgggaggatcacttgaggccaggagtttgggaccagcctgggtaatattactaagttaccttactaggccctgtctctacaaaaaaaatgaaaacaaaaaacaaaaaaaccattagccaggcgtagtggcatgcacctgtagtcccagctgctcaggaggctgagatggaaggatctgttagcccaggagttccagactgcagttagctatgatcgtgctactgcacttcagcctgggcatcagagtgacacctcatctcttaaaaaagaaaagaaaaaaaaaagcagatcttattgacttttgtgctttcggtacctggctcaggactcgtttgttgaatgaatatgtgaacacgtgaatatgcattttccattgcttctaccttggttgcctctctgagccagagagcaattcaaaataacaagcatttcctgagcacctactgtgtgtcaggcattgttccttgtaccttcaggagctcattggttcaggggaaaagcattgaaaatgaacaattttgtaattgttggaaacctaatagagctgcatgaagtggaagaagtcagatttataatcattcagaggtggtataaaatgaacatcatttttaaaaaaggtttatgcggtataatttaaataaattcattttaaggatacagttcacacctaaaattgcagctatgtctgcataactgtctaaattcactcataatttacatggttatgcagccattgctgcaatataattttatatttctatcatcccccaaagaaatcttgtgcacatttttttgtcactccatattcctacccgcagctcctggcagccacgaattcacaaatctactttctgtctctatggatttgcctattctggacatttcatataaatggaatcatatgtgaccttttgtggctggcttcttttttttttttttttttttttttttttttttttttgagacagagtgtctcactgcactcgcccgggctggagtgcagtgatgtggtctcggctcaccacaaactctgcctcctgggttcaagtgattctcctgcctcagcctcccgagtagctgggactataggcacgtgccaccacacctggctaatttttgtatttttagtagagacggggtttcactgtattggccaggctggtcttgaactcctgacctcgtgatctgcccacctcagcctcccaaagtgctgggattacaggtgtgagccaccgtgcccagccggctagcttctttcacttagtataatgttgtcaaggttcatccacgttgtatcatggattcatactatttatatattttttaagacagggtctgtctctgtcaccccagctggagtaccgtggtgcagtcgtggcttactacaacctccacctcctgggctcaagccattgtcccacctcagcctcttgagtagctgagaccacagggattgtgccactatgcccagctaatgtttgcatttttttttgtagagatagggtttcaccatgttgcccaggctggtttcggactcccgggctcaagcaatccacctgcctcagcttcccaaagtgctggaatttcaggcatgagccatggccgccggccataacatcctttcttttcatggctgaatactatcccactgtctgggtagaccacattttgtttatccatctacccattgatgaacatttggttgtttctattttttggatattatgaataaagtccataatttttaccaatatggaaaagaaaaacaagaaaaactctgaatgccatatcatggatagatggcctattatcattccatatcatctgtacctttttccgccagaatgttttgagacatttattaagtaaggatcacaatgatgataattactaaaatggagagaacctgtggaccatgggaaccactaggccatgtgacactcatgtttatattagagaaaggcaccgttttctcaaagcacttttcctccatctgctgaaagattattacaataaatacacaatgcaatacaataaatgaccaatgcaaatagtttctccatagagttatgcagtgtacaacatgcaccacggtccatggccatcctgcaggtaggaggtcaagtggaaaggtctccaactcagctctagaaaagtgcagagttagagaaggtatcatagaagagttgactcccaagacgatgtttcagatacagattagggtatgtacccgaagaattgaaaaggtactcaaactaaaacttgtacaggaatgttcatagcagcactatgcagaatagccaaaaggtggaaataacccaaatgtccgtcaactgttgaatggataaacaaaatatgatccatccgtacaatgtgatatgactcagccacaaataggcataaagtctgggacctgctacaacatggatgaacttcagccacatgctgagtgaaagaagtcagacatgaaaggccgcacatgttataattccatttatgcaaaaatatctagaataggtaagaccatagagacagaaagcaaattggcggttgcaagggcttatgggggagtggctgcttaacgggtagagggtttcatttgggggtgacagaatattttagaactagataaaggtggtagttacgtaacattgtgaatgtactaaatgctcctgaattatgcactttagttatttttttatctttattactattttttgagatggagtctccctctgtcacccaggctggagtgcagtggcgcgatctcagctcactgcaaactccacctccctggttcacgcgattctcctgcctcagcctcctgagtagctgggattacaggtgtgcaccaccgcgcccagctaatttttgtatttttggtagagacggggttttgccgtgttggtctcaaactcccgactttaggagatccagctgtgtcggcctcccaaagtgctgggattacaggcataagccaccgcacctggcttgaattattcactttaaaatggttctttttatgtagtgtaaattttacctcaatggaaggaaaaaagagagagagagagagaatggattaggccagagaagaagtggtggtgggtgcactgggcagaagaaatcacttgtgcaaagcaaggagggagtgaaactgctttgtacggtggagaacactgcttttgagtccaacacaagctcaggcttggggaaggaatcagataaaaatttccaggatctcagagttccctgtgctccacacgggttggcagacagcacccacatggagtccttctgctcgtaaccagcaccctgcaagcttcccacgcctggaagtggtgtgtttttgatgggaacgtcaggccagaggtctcccagcagcccccagctcggagccgcgctggcagctcccaggccttctcctggagcccgctccctctcctgggggccctgtgagcatctgagcctataaatctctcctgctctgggcctaggattcacaaggctgccaggaaagcctgcctctctccctgaagtagtggatcaacacagcccatctgtctgtccatctcaaaatctttccttaagatagtggaggttgtctgggccggtcccaggaggttctctctgtctgggttctaatcacagggtacctggttcttctatccttcaccctcttttaaaaaatcactttttagtactttgggaggctgaggcgggcggatcacctgaggtcaggagttcgagaccagcctggccaacatggtgaaaccccgtctctacaaaaaatagaaaaattagccaggcgtggtggcacgcacctgtagtcccagctactcggggggccgaggtggaagaattgcttgaaaccaggaggcagaggttgcagtgagccaagatcgagccactgcactccagcctgggtgacagagcgagactccatttcagaaaaaaaaaaaaaattaaactggtttcccattttgctctgtcctcgagtgaatttctccccctgggtggaagctaaaggcacgggtatctgtctgtctccagagtataatggagagattaaagtttgattgcttttttcctgctttttttttctttgagatggggtcttgctctgttgcccaggctggagtgcagtggcaaaatctcaactcactgcaacctccacctcctgggttcaagtgattctcctgccttagcctcccgagtagctgggactacaggtgcctgccgccatgcctggctaattttttgtatttttagtagagatgggtttcaccatgttgcccaggctggtctcgaactcctgacctcaggtgatccacccacgtgctgggattacaggtgtgagccaccacgcccggcctcctttctcttataaatagggacaccattgatttaggtctcactccaagccaggatgacctcatctcaacatccttcccttaattacatctgcaagacccttattctaaataaaatcacaggtgggatacagtggctcacgcctgtaatcccagcactttgggaggctgaggcaggtgggtcacttgagcccaagagtgtgaaaccagcctgggcaacatagcaagacccaatctctacaaaaaatacaaaaattagccgggcatgctggcatgtgcctatagtcccagctacaggggaggccgaagagggaggattgcttgagcctgggaggttgaggttgcagtgagctgagatcacgccactgtacacccacctgggcgacaaagtgagaccccatctcaatcaattggttagtcaataacatcgcagtctgaggttctgagtgaacatagcttttgggagtcacagttcaacccaccctagtgaccttgggcaagttgcctcacttctgaacctcactctccttatttgtaaaatggaggcaatgccagtgcccaccccaggagctgctgagagaattcagtgggtcacttcaacacagaagttcagcatacgcctgcagtgcagtgagtgctcgggagatcggagctgttagtgggatcctaatgcggtggctctttcttttctgtctttttttagctttgtggtcatgatggtttcataaagaacaataccgactctttttctattgaccatttttggtgggatgaggaaaagattgtatgtgttcatagcacaaacataaccaggatagaagtagaatgggtgaaagtaggtcttcctcctgtcccttttctcaatacttcaggctcaggcctgtttgttggttttttttgtttgttttgttttgtttttggagtctcgctctgttgcccaggctggagtgtagtggcatgatctcacctcactgcaacctccacctcctgggttgaagtgattctcctgcctcagcctccggagtaccttggattacaggtgcatgctaccatgcccagctaatttttgtatttttagtagagacagcgtttcaccatgttggccaggctggtcttgaactcctgacctcaagtgatctgcccgcctcagccttccgaagtgctgggattacaagtgtgagccaccgcacccatcccaggtctgtttttagagatagggtctcactccattgcccaggctggagtgcagtggtgtaatcacagctcactgcaaccttgaactccttggctcaagggatcctactgtctcagcctcccaagtagctgggacaaggggtatgtctatcacacatagctaattaaaaaaaaatttttttttgtagagactgggtcttgctatgttgtccaggctggtctggaactcctggcctcaagtgatcctcccatctcagcctcccaaagtgttgagattacaggcatgaaccactgcatcctacctatatatctgtctttttaaaacacaaaaggtataacactatgctacctcatcttttatttttagcttaatatattttggatatttttctgtgtccatccacaaagctctgcctggttcttttcaatggctgcctattttatttatgtatttatatcttatttgtttttgaaacagagtcttgctctgttgcccagcctggcatgcagtggcacgatctcggctcactgcaacgtccgcctcctgagttcaagcaattttcctgcctcagccttctgagtagctgggattacaagcgtgtgccatgacacccaactaatttttgtatttttagtggagatggggtttcaccatgttagccaggctggtctggaactcctgaactcaagtgatccaccctccttggcctcccaaagtggtgagattacaggcatgagccactgcgcccggcctgcctatttttaaatgtgccattatataaacacaccagaattgaaaccccagagctgactagtctttaggccttttgtcttgaggatttcgttcaaccaggccacccaaacatccatctataatccgagggaagagagagagaactgattggagttgggcatagaatctgaggaacgtgcccacatccaatcagttctctcttaagattacagatggaagaaagagtcatctctttcaccttgccttcttcagtcccatccatcctcccattcatattcccatccatccatccatccatccatccatccatccatccatccatccaactcatttaccggcctatacactctgtcctccctcccattcacccacccatccactctctcatccactcactcatccttccctcctccgtccaaccatccgtccaaccagctatatacccacccatctacccatctacacacccttccctcctttcttctttctttcttcctatctatccatccatccttccttctttccatccatctattcgtccacctacccacccacccactcatccatttgtcttcctgtctctctacctgtccatctatccatccttccatccagccatctgtctgcctattcacccagcctcccatccatttatcctcccgtccatttacctatccatccattcttccatccacccatcctttcttccttccttctttcctttcttccttccttccactcacttgcccatccacctcttcttccatcctcccatccatctactcatctatccatccattttcccacccatctgcccatccacccacccacctactcacctactcatctgcttatccaccctcccgtccatctgtctattcatccacccacccacccatccatctacctacccatctacccacccttccattcacccatctacccttccttcctttcttccttccttccgtccactcatcttcccatccatctactcatccatccctcaatccatccatctaacaagcataattcagcacctaccatctatgtgccagtactagagatacaatgtaaaaccaagcctaggagatttttgatgaaatgaagcttgtgagagctgagcactgaactagtaggactgaagccagggagtggatttaagaaatgcttgccactgtggcattgtctaccagcagatatgatgctgggatttctacattgttaggtgaccattgaacgtattggtaactgttctcagatctctctttgggaaggaaatgggtcttcagagcctggctccacctcagaggcctctttaagagtagaaggtgatggataatgtctgcttaatcacatctagttctttgatgacctctgtatcttttgggtttctctggtggtaaacaagagagactgactctgtcatctagtagaggaaagggatttgtaggggagtatggaggagctcacagttgcagtgggaacactaggaatcaggctaggtaaatgacagaaactgggctgcttgggcccaggggcagaaaggaagtctgcctcagggctctgtccacctgctgtgcttccctgtccttgactgagcttggagttttaggccagagagtctgaccaatgcagcctggaacacattcttacctctttgttgaaggtacttatgaggcagtcccactaagactgtacatgacggtaggggtgatgggggaaacctcaaggaccacaggatgcttctggaagaagaggaaatggatgctggatttacaaaaaaacacaaatgtgcacaatactatattacagatgaaggaactgaggcatggagtttaagaatatttgcccaaggccacagagcggagaagtggctaagggggaccccaatctgtatagatccaacatctgcgtttggtccctaacctaatctgggtggggtgggcctcccgggacacctccagagctgatgtggctggatgctaatgactcctggatcagtcaggctccagcatctttctggggctgcctctgggactttggggctgcccttttggctttggtcgtggcccctgtagcctgggcaatgagcccagctgacctgttgtcacttccaatgaggccagcatggagaagctttagaatgggagggccctgggaggagccaagtccagacccttagctcagagctcattttaattcatggctcttttttcttctttctgtttgcagatcgggaggaccagtccattctatgcacgtaagtggaactgctttttcttctgttttttttttgtttttttttttttttaatctgtagtcgagatccaacctatgaaagaaaagatccatgagtgcagagatctttgatttgttcatggttccaagtgcctctctttatacctggcaccatgtagatgctcactaaacatttgtgatatatggtcttctgcggaggcaggcaaacttaaactcttaatgacacctgctatcatttggttccatacctctcctccttctaaaaaactagcatttattgaacatgtactctgtgccaggacttgaactaaagattttatatgcagaatcttatctaattgcataacagccatctgtgttgatagggaagatgttaaactgtcactttagtatttcacatttatcaagccacaaacacatcagtgccatatttggtgattggtatcactgtttctttgaagacctaggtacataggcagaagatagtaactcaattttagaatcattgagagagttttcactattgtatttatatgcaagtaacatatattaatatatattgttgattcattgacattgaactcacagccagcagctctgtggctgatgcctggatgaagtttatctgatgtgtatttattacataatgggtatcacaactttattgtgcttggaaacatgagccaacacttgagcactatgctggggacatttttgtatgtgtgctgccgaagggagcacatctgaggggacattttaaactgcaaaataactaacaaaaagccacaaaaatacaaaaaaaggtggcactaaatacactacagaaaggacacttgtttacagtatgagagttgaaactagaaggtagagcattcccctgttcaacctgagctgggaacgtgtgcattgggggaatcgaattttccttactctgcacatgttcacaaatgactacaaaagtgccatgaatattgattttggggttacaaataactttcagcaggtcggtgaatttgaaaatatagaatatataaataatgaggatagactgtgcatatatatatttacataatatataatatgtattatatttaatatatttatatttatatatatatatatttgaaggtctggaagcaactaaagctataatcaacagaggttatttaaataaaatatagcatttccaggtagccactacaaagagtgaggctgatctatttatgctgagagagaacgctctttatagataataccgttgagtggaaaacacaggggcaaaccagcatatgcataatgtaaccgtgtgtgtctttaaaaagagcaggattgcatggacgtgcatatgtttcctatttgcatgaaattatctggaaggacaattaaaaactagtaattagaatttcagatggtgatggatggtaggatggcaatgaactgtattgagagaagattgaaacaattaataagtttggggttgatatagatagaaaacctggaaacaataaaacaaaggcaattataaactccaggaaaaaacaaaagttgggatggaaggagaagtaatcacattggactaaggagcccagctgtgcaagtttggagtatttatctaaccagaataactccctgtgatggacttggctctgtggggaaagggaagaggattagatgggaactgaattctcatattccatggtaggatgtacacatttgatgtttgacaatgaatagtctggatctagagatataatgctacctagctatgaggatataaatgctaaaacaacctgccgacttggtttcctagttttctggcttctaggggtcacctgcattccttggctcatggtctcttcctccatctttaaatcctgcagcatggtatcttcaaatctctttctctggtccccctacctctctcttataaggcccagtacctttgtggttatattagccccacctagatgatccaagacagtctcctcatctcaagcaaacatattcacagattctgaggataggccatggacattcttgtgggggctgtttttcagctagccacagaggcatttgatcccctaggagccaaacccatgtgtgagccacatgtcatctccccaggaaccaaaatagtgtagctcaactgccctctgttgagtgaatgaattaagtgtggtaacagagaggtgcaggaaagagtaggactttcagatggcttcctagctatgtagctatgcacgggtcacttgacctctctgagctgagcttatggagaggctgtgaagatgaagaagaggccaccctgctctcatttccagcacccatgccatcagcaggtgctgtttcatctaaaacggtgctatccaaaagaactttgtgatgagcacaaagttcacttaaaagttcacttaattgagctcttaaaaagtggcaagtatattgcagaactgaatttttaagattttagttaatttagatagcggttcctgccttggacggtatgatgctgaaatatttctcatctctgtccattcctctgactccaccgcctcttcctagttcagggtcccgtcacctctcaccagggcctctgtagcagtctcttaagctccctgctcccattgcttgcttgcttccttcctttaataaatatacattataagaatattcactcattattcattgaataaatattcattagcatgctgtcataaagtgtggattccagaacctaaccccttgggtttgaattctggccccatcatcgtctagttagttgtatgctccaggaaataagtcagttcacttctctgagcctcagtttccccatctgtaaaatgggaacaataagcaccccattgggttgttggaaggatgaaatgagtcactacatgtgaagaactgagaaacaggccactgccccatggtgagcactttgtaaggatcagctgctattgtagtgaaagtgctcactattttttaaaaatccttcctgcaatccagtatccatcttgcagtttgtttgtttgtttgtttgtttgtttttgagatggagttttgctctcattgcccaggctagagtgcaatggcgtgatcttggctcacagcaacctccacctcccaggttcaagtgattctcctgcctcagcctcccgagtagctgggataacaggcatgtaccaccatgcctggctaattttgtatttttagtagagacagggttttgtcatgttggtcaggctggtctcgaactcctgacctcaggtgacccggggagcctcggcctcccaagtgctgggattacaggcatgagccgctgagcctggcccatcctgcagtttgttgttgttgttgatttttttgttgagacagagtctcactctgttgcccaggctggagtgcagtggtgcgatcttggctcactgcaacccccgcctcctgggttcaagcaattctcctgcctcagcttcccgagtattatgccatcatgcccagctaatttttgtattgttaatagagatgggttttctccatgttggccagcctggtctcaaactcctgatctcaggtgatccacccacctcagtcagcctcccaaagtgctgggattacaggcatgagccacttcgcccagcccatcctgcagttctgattctccccacactggttctaaagtcccgttcccctcgtgaaatggtttcctgcacccatgagaataaaactcagattccttactgtgacttggaagactgagtgtgatctgctcttccctcttcacttcctgctgtcctcctctgttgtggccctccagccatgctgggagccattctgtctcatacctgggcccagcatttccctcccttggacctctgtccatactgtttgccctgcctggcccacccttccctccatccttcccacagggctctcttgtaactttcaaggctcagcaactccctggcttccccatccacagcctcccctctcctcccttcccctcgatcttctcagtcacatcacccagatgtagcaatgatatctccaccacgaactatcttgattatttgtttacttggctattgtgtatctccatctcctggaatgcagcgttagcaaggacttggcacactgcccacacacagccagtgctggagaaggaggccttagccattgttaggaaggaaatcccaaaacgatcagacttttatttgcaaatgcatccagtcagcccagaaccaccaacatcttcagtctctgtattcaattttattttgcttgttgtgaaattcagccaaagtgacttgaaggacctacaagttgacagcagggctgagcttttacgcgtagttggtgcttaagagaagccaggctggagccaactgtttggttatgcagttaagaaactgaaaattggccgcgcactgtggctcaggcctgtaatcccagcactttgggaggccgaggcgggcggatcacgaggtcaggagttcgagaccatcctggctaacacggtgaaaccccatctctactaaaaaaatacaaaaaaattagctgggcatggtggcgggtgcctgtagtcccagctattcaggaggctgaggcaggagaatggtgtgaacctggggggcggggcttgcagttagcagagatcgcaccactgcactccagcctgggtgacagagcgagactctgtctcaaaaaaaaaaaaaaaagaaaagaaaagaaactgaaaattggccacgcaccgtggctcacgcctgtaatcccagcactttgggaggccgaggcgggtggatcacgaggtcaggagttcgagaccatcctggctaacacggtgaaaccccatctctactaaaaaaaatacaaaaaaattagccgggcatggtggcgggtgcctgtagtcccagctattcaggaggctgaggcaggagaatggcgtgaacctggggggcggagcttgcagtgagctgagatcacgccagtgcactccagcctgggtgacagagcgagactctgtctcaaaaaaaaaaaaaaaaaaaaaagaaaagaaaagaaactgaaaattggctgggtgtggtggcttatgcctggaaactcagggccttgagaggccgaggcgggagggtggctggaagccagaagtttgagaccaaactgaggaacacagtaagaccccattactacaaaaaatttaaaaattagctaggtgggatggtgcatgcctgtagtcccagctactcaggaggttggggagggaggatcacttgagcttgggagttagaggctaagtgagctatgatggcaccactgcacctcagcctgggcaacagagcaagacccagagacaggaaggaaggaaaggaagggaaggaagacaagaaaggaaggaaactgaaagctgaataaatgtaatttttaggcctgagttgtattttgtctagcatgtaatccatccagtataatcagtttaattagaggccatgggcctggctggagatagagctgtgtgatcagggggctaaagtaagaggaggagggtggtttcacataaaattagagagaggtaagggggtgcttccaggccctggggaggagtttaaactttcgtctaaaatggatgacaggctgggcatggtggctcatgcctgtaatcctagcacttcgggaggccaaggcaggctgatcgcttgagctcaggagttcaagaccagcctggccaacatggccaaaccccctctctacaaaaacaaaaattagctgagcgtgatggcatgtgcctgtagtcccagctacttaggaggatgaggcaggaggatctcggttcactgagcctgggaggcagaaagttggcactgagccaagactgcaccactgcacttcagcctgggtgacacagtgagaccccatctcaaaaaatatatataacaataaaataaataaatgaaatggatgagaacgtgctaagggactcaagccaaggaaggacaaagtttaaccagtgggtcaaatcaggcccttgtctgtctgttccagataaagttttattgaaacacagccgcacccacttgtttacgtatttgcttttgtgctgcagtggagagctgagcagatgtgacaaagaatgcgtgaccctcaaagtctaaaatatttactgtctgaccttttacaaaaagagtttgctaactcctagcttaaacagtgggaaaatgtgaatattatttatattgtaatgataggatgaatgctgaaaatcattatacaaacaatatataacttctgtggaagcagtggttataaaagtaataataggtgggcacagtggctcacacctgtaatcccaacactttagggggccgaggcaggaggattgcctgaggcctggagttcaagactatcctgggcaacttagcgagaccccacaaaatcaaaaaattagctaggtgtagtggcacatgcctgtcatcccagctactcaggaggctgaggtgggagggtcacttgaacccaggagttcgagattgcagtgagtcaagattgtgccactgcactccggcctgagcaagaagcaaaactctgtctcaaaaaacaaaagtaataataactaacattttggcataccaggcattgttctaagcattttatataaatgttcactcatttaatcctcataagaatcatataaaaggtcaggcatggtggctcatgcctgtagtcccagcactttgggaggctgaggctagagatcacttgagaccaggagttcgagaccagcttgagcaacatagcgagacccctgtctctacagaaaatttaaaaatcagccagctgtggtggtgtgcacctgtagtcccagctacctgggagattggggcaggagtatcacttgagcctaggaattctcagctgcagtgagctatgattgcatcactgcactccagcctgggccacagagtgagatcttgtctcaaaaaaaaaaaaaaaaaaatcatacaaggtaagtgtttttattatacccattttataatggggtaaagaaactgaggtatggagaggctaaatgacttgcctaaggtcacccaggtaactggcagaggagggatttgaacttgagcaacctggtcctggagcccattatgctattctgccaattgatgctataggggagagaggcgttgcttctgcctggggttttgcaggacgtgtaggagttgtacagtacaaaatgccagggtgctttgccagtcacataaagaccagggactgaatagctgtgaggttcatcagagacaatttggctttcctaccagtggcaaaccacaggctgcaatggacttggcaatattcgaccctgggagccaggaccagctgcagaatttgtagaattttgcaaaatgaaaatgctggctgagtgcagtgactcacacctggaatcccagcactttgggaggctgaggcgggcagatcacatgaggtcaggagttcgaggccagcctcgccaacatggtgaaatcccatctctactaaaaatataaaaattacccaggcatagtggcgggcacctgtagttccagctacttgggaggttgaggcaggagaatcacttgaacctgggaggtagaggttgcagtgagccgccatcacacactgcactccagcctgggcaatagagcaagagtcagtctcaaaaaaaaaaaaaaaaaaagaaaagaaaaaaaatgcagagcgtttataaagaattaggaagaatttccagatggcaacattagagtatgaagcacagggtggtccctgtgagacggtacaggtcacactcatgaagccagcctggctgggggattaagtggccattgggtggttcttcccagctgctggggctggactgattaaaaggacttggcactggggtagttacaaggccaggaggccataacgtggtcatgagtctggtccttctccgggaagagggagctcagtaccaaattccccaagaaataagaaaggagtttagggtgctcagaccaggaaggcatcttcacccctagaggtcaggggtcagaaaagccaagctatgaatgtttctagaaccagctctaagcacatcaaccttcagacgcccacgagcctggagcttgggatgttttctttggcagaacctcccagggcaatttatttttctcaacagaacttggaaacagtggagcccagcagcaacatgggaaggggtagatgcccagagtttatgtcccactccccatcccaggcaaagtgggagaccatagccacggatagggcacattgatgtctttgtttttttttttgtctgtctgtttgtttgtttgtttgtttgttttttgagatggagtctcattctattgcccaggctggagtgcagtggcacgagctcagctcactgtaatctccgcctcctgggttcaagggattctcctgcctcagctccccaagtagctgggactacaggcacccaccaccatgcccagctactttttgtatttttagtagagacagggtttcaccatgttggccaggctggtcttgaactcctgacctcaagtgatccacccgcctcagcctcccaaagtaccgggatgacaggcgtgagccaccacacccggtgatgtctttgttgtaaaagggaggaggtgagagaggttcaaggccagggtggaaaggaaggaactattgtgggaaaggagaagtgagcagcagcagtctaggagcactggtttgtcagcatgaagagtgtgatccacacatgttgtttgtgcacactgctgtcctgattcttgtcttggatctgaataggttcatgaccacctacgcaagtggtttcctacatccaaaaatttctctcctttctcttgctttaatcagaatccaaccccttcactttagaatgaagtcaagcaaggttctgacgttagcctgattgaagtaattcatacttaggtgtgaatgactgagtggcttggttcattgattggggcaagtaaagcctcctggaatatatggcagaattccagtggagtggggctgggacttcactctgtcttttctctttgctgatttgttaaaataaaagggtaggaggcagaacatgggccctggtgtcaagtggacctacgttcaaatcctgcttctcctccatttcctatctgtgtgaaagcaggagcaattgtgggctggagcaatttacttcaaacctctctttgcctcagtttccccggatgggtgatggggataattaataactctctcattagattgctgggtagagtaaatgaaaagatctgtgagcccaaagcctagtactgtgcaggccttcaacaaatatcaattccccttcccctgcccttcttctggccttagaaagcaagtccctagagggttgggcctgtgtcatggaacaacttggtgaaatgtagtaaaaggaattctgactgcattagaatcagagacctgactttccattctgactgtatcccttctttgctgtgtgacctagggaaaattgcttacccactctgggcaagactcttccttctataataacatggaagcaggaagaggataaaggaaataattcatgtagagcatttagcaaagggacccttccccctatatccccccaatgacaaacgccaattcttctctgtcttaagagatgggatcttgctatgttgcccaggcttctctcaaactcctggcctcaaggcatcctcccaactcagcctcctgagtagctgctattataaacgtggccagttctctgctgcacctggccagttctcctcttttacacacacacacacacacacacacacacacacacacacacacatatattctggtcttagtttccccttctggggaaatggggtaatgccttcatggtccccatttcataaactgcctctgaggccatgtgaaataatgtggccattgggaaggaaggcctctaggaagggaagggaccacacaaagtcaccgcaagatgtttcatcattcttggccatcagacacttgatttctggacagtgggacctgtaggattaggcacagcaatttggggcactttttttttctttctctttcttttttcttttcttctatttcttttttaagccatgagccaagttattaatgggcctttggcagagaaaattaatttctttatttcctaattaggaagaagagcagagactgtactagctttggtggcactggttcagcacagagaaccttgggctgacctcggggtgaacaaattcttttttcaacttaaaaaaaaaactctcttatattttagagtattaagtgagctcagaaaataaaagagataaggcaaagaaaggaaacacaaaaaacaaaagtaaactgaaaaatagaagaagacgataaacaagtgaagttttggtcaaggcactgtccttatctttcactaggagtggtggaacatagaggcagtatctggatggagcggttccattgtgatgatttctggtggccaaaacaggcagctagtgcacgaaagccatcttggtaaaaaaaaaaaaaaaaaagatctaccttcatattccaggaggacatacttttttgatacgacaaaccatgtcgtgctgatctaaacatatcagtcatttacactttagtgtgaattacttcaactgggtttattcttagatacttggctgagatcatcagccagcttcctgatacatggggtgggattcctcagaggataaaggggcttgcatctgcccagtgaccaatgggataaccggttttttggtaaatttttctttccataagggagcttcttaaactttaggtcctggtactccagaggcacttacatcctttcttgaaggctgccttgtgcctggtctttccatttctagcaatgctaatgatgtctgcaggcggatcacgaggtcaggagatcgagaccatcctggctaacatggtgaaaccccgtctctactaaaaatacaaaaaattagccgagtgtgctggtgggtgcctgtagtcccagctacttgggaggctgaggcaggagaaccagggaggtggagcttgcagtgagctgaaattgtgccactgtactccagcctggggacagagtgagactccatctcaaaaaaaaaaaaaaaaaaaagtagataattccaaataaacctgtttggacctatgtaagaaaactaaggttttcttgttcactctatttttttagagatgaggtcttgctctgtcacccaggctggagtgcagtggtgtgatcatggctcactgtggcctcaaactcctgggctcaagccatcctcccacctcagcctcctgagtagctgggactacaggcatgcaccaccaagcctggttaatttttcttattttttatagagtcagggttgtgctgtgttgctcaggctggtcttgaactcctggactcgagtgatcctcctgcctcaacttcccaaatagctgggactacaggcatgtgccaccatgcctggctaatttttaaatctttttctagaggcagtgtctctctgtgttgctgagctggtctcacactcctgggctcaaatgatcctcccacctcagcctccccaagtgctgggatcacaggcatgagccaccacatccggcccaccttttcactctttgtatctgaattcttttctatgtcctcttggaaggaatagattgggcattggacctaggctggggacccagttccgctcactaccagagatgtggccttgggcaagttacttcccctctgggagcctctgtttcaccctctgggaaatggtggtgatgatcattattgtcctgcctggctcatggaactgcggaaaggtcaccatggaacgtgtgcatagatgatgttcccgtgtctttcagaggcgagtctggagccgggaaaaccgaaaacaccaagaaggtcattcagtacctggccgtggtggcctcctcccacaagggcaagaaagacacaagtatcacggtgagtggcagttcccaatcagaggccatgatttagccaaccggtctccagcttgcagcccaaccgagatacaaacagaacatcattgcaagaactcaggccccatctgactacccctcccctgaagactcaaagagggaccgtctttttggcgagcaggcctgttgagtgtgggtgatttcttggctcagctagaagcatccctccagaagggggcccgttttgtgaaatgagaataagccctttccttccatagcgagatcttcctccacgtcggggcttctcagtggtggcactgatgtcattttggaccagataactcttccttggaggggcttccctgtggctcgtagaatgtttcacaacatccctggcctcgacccgccagatgccgacagcccccttccctccagttgtgacaaccaaaaatatctctagacattgtcagatgttccctggggtgggacagttgcccttgattgagaagcactcctttcatgaatctctgtaacgtcccaggggttaaggtaccttttgggttcccggattcctccacgtgtccccctgtccctgggatggagatgctggtatcactcggcccgtgggcttcagtgcaatgccattcagtaactgtggattgagcacctactgtatgccaggaaccacttggggtggggacctggggataagtctgagagatgctgttattctcttctctgagcttccagacctgtggaagagcatgtagttgtcaaagaatccctcaaataaacagatgatgacacggtatgactaagagcttgggaggaaaagaagagcaggtttctagagtcatcacctctagggcccatccttctcttcctcctcgtgtgtcagccctgccccatctatcccacaggagggggcacgtggtagggccgctaggactggccggtgcctccgtctgcaggtttgtgggtgggaagatggtaggatggagatctgaccacggcatggggtgtctccagtgttcgccattccagatgtcactttgcgtcctcagaggggactctggggcagccaccatggccggcttgtctggaggcccttggagatctaggatgggcgctggtcgtggctttggagaactttccttctccaaacaaatgcaggaaactcaagattcagcatcctagaattgtctctggcaagttggtttccagccatagtgagtgggaacaatggccccagaggctgtgtggcagtttaaacacagtttccactgccttccctttccctaaagagtaaacacaggagataatactttctaacaactcatcgttatcaagggcctactatgtgctgcttgttttggctgcatgcgtaaacacatctcagacattgtctcactggatactgttttaaggagcctaatgtggccccagtaattatgaaaacctttgaaatgtctggatctctaagaaattagaaaaaggagggaatggctgagcatgggggctcatgcctgtaatctgtgttttgggaggccaaggtgggaggatggtctgagcccaggagttcaggaccagcctgggtgacatagtgagaccctgtctgtaccaaaaaaaaaaaaaaaaaaaaatcaagagaattagctgggcctggtgtgcatgcctgtagtcttagctacttgggaggctgaggcaggaggattgcctgagcccagtaggttgagactgcagtgagctgtgatcgtattcctgcagctaaacagagagaaaagaaacagtatcaaggaaaaggagctgaccagtctgtctgggagactccaggctgtttggggggatcaaagtcatatattctccagcccctgatgtccatgtgatggaaataacgctgacatttgttttatactgtgttgttcaaccacagcaaggcccatcttttgcctacgtgagtaactgagagtgttttcctggtgtgtaggggaggcacggagtgaacttagatctgcatgatcctcttgcacccaccgagtcccgtagctggtggtagaaatggggtaggccctagagtttcacaacttaaatcagtaaatgcaccaaaataccatcctgtgggtgtctgatgccagggaagggtgtgggggtgcatttaccacccacgggacgcctattggagtccccagggttgcgctccagcctgaaatggatttctccggttcagaatgaacccctgcacccttcaaagcatccgctcctggtacccttgactggaacaacctagacagagatgtctgtcccatctggctgagtgttttaggactgtcaggccccaaagcttccctggctcgatggacagtcgatggcacagctgtggcatgcctccctcttctctccctgccatcatccctaagtgtcttccctcagccctgtccctggtgcaccagtgtgtccctgtgcatgcgtgtgcagtgcgtgtctgtctcttgcatgctggttgcttgactcaagcctccagaaacagtcttggaggtcgcgatgcactagctttggtggcgcggtaaggccccagctacgcaacgcataacctggtcctgcttggacctgtgcatatgtaaactcatctctaacacagagcttggggggctgatgtgtgggtcccagcctagaagaaacccacaggtgtcttccttggctcccgaaaagatcattcaatccatcttagttagaccctgggtgactgtgttgcagatcagaaggagaattacagttcttatttgggatctgcttttgtgtgaccttggccgagtcagttaactcctcggggctatggtttcatcatctataaaattgagggtttgaaccaggtcccccgatttaaagctctcttgccaagacttttcaaccttacctgccagaatccccattctagaaagggagcctttttcagagagcatggagaccccaagtttatgtgaacaaaagtgattcctttagtcgtcttcccaccaacaaagaaatgcccgtggtgctccttgtaaatttccaccagtctcagctgtggtgattccacttgtagctgagatttgtatgcggatgaggcttttgcttcatctttctctgggagctacaaaaaggaggatgtgtggacaaatcaaaacagaaacaaatagcagcttcctgctttgtcctgtagaccaggtaccctgatgccttcctagcatgcggaggaatgaggaggaagccatgcccatccttgtcccctctagacactttcccggctcctgtccagcccagccctgatgcctggaaaaataaggaagggaaagcaggaggggaggacaaggagaaaaactcccagaatccagggcctggaggcctcggggcccaactgcagccgccatgttttagggctaggccaagagcagctcgtttgctttcccagcttaacttaccacattggccctttcctgccatgattaatcacgtgaccgcgtttgtgcaaaggcatcccggcagagggggccggtgggctgtgtacagtctcagcttcctttaacccaatgaatggagctcaggcaacctgctttgaagctttattccgcagtccgctaagaggattcctggtgggttttgtgcattccttacttgtctgctgtagaagacttcagaaaaccagtcctgagaaagaaaaaattgcaacttaaaaaaaattgcactaaaataattagaaggaggcttgtagtggtttaacttgaagaaggctgcttgttaaacatgaacagcagcacgactgccatgtacagtgggacaggtggtgcactgcacaactccggggggcaccattcatcatgatgtaaatgacatcaccgacattgtgcaaggcagtggctttgagtggcagtgatgttgcacagatgagcaggccctggtcttgaaaaaagtgaccttcctagggagcagatgtcctagctattagagagctcagacagttgcttctcttctgaaatcctcctgtaaatctgaacattagcatcagggtctaagaggaggtaggagataggagagaacctgtgggttaagggcagagttttgtgacaacatccatccaaggtagaactgtcaggacctaggttgctttctccaataactagatgtgaatgaattttagggagagctggaaaagcagcttctacaagcaaacccgattctggaggctttcggcaacgccaaaacagtgaagaacgacaactcctcacgattcgtaagtagcaaagccacatggattttccagaaaagctttggtgtcatctcctgcctggggctgcagagtgtttgcgtgcagaggtgggaggggcatctgaccctggagagatgggctgtatctcacaatcttgcaagggctcctgcctctcactctctcattcattcattaatttattcactattcactcaacaaatattgattggcctggtgcggtggctcacacctgtaatcccagcactttgggaggctgaggtgggaggatcacttgagcccaggggttctagaccagcctgggcaacaaagcgagatcccatctctattattaaaataaaatttaaaaaattaggtattgagcacctggtatgggctagacccttatatccgataccattttatgtaacaaaacatgaattgagtgccaactgtgtaccaggcacacacctcctccaagaaatacttagtaagtacctactgtgtacaattactctggtaggcacttttacatgtaccaccattctctttgtttttttctcatttgctgtttttattaagtgcctactgtataccaggcactcagcgagtctcacaggattgcgatgaatagttcagatatggttccagccttcatgaagctggttcttccaactgaataacagagagtaagtgaggcagggggtactaccttcccatgcacactcccccaggctccaaagcaaaaagtttttgcctgagcccaacagggcaggggaactctgaaagtggatggttgatgataggtagacaacaatggttttattgtgcaaaagaagcggttgtctccgtaggagggtcagaaagatattttagtgagaaaagatgaaggaaaaattgcctctgcattccaggagaagggggtctctgaactgttgctcgctgagatggggccctgtgaaagactctttgcagaaagctctgctctgctgagcaaatgcacatggtggtccctgaccctgtgatccccaaggcccattttagtaacaaacaattacataatgtctcctttcctcgcccgaaattagaatcatagatagtatcacctcctacacgtattagatgaatacacatcagcataatgccctaactggaatatgaagaagaaataacataagacaattcataatgaaagtgtgcatttcaggccaggcgaggtggctcatgcccgtagtcccagtactttgggagactgaggcgggcagatcacttgagctcaagagtttgagaccagcctgggcaacatggggaaaccccatctctacaaaaataaataaataaagtgcatttcagcatatcaatgctcgggccaggccacaccaacagaagacacagtaagagacagacacttaggtctatccacggcgacagctacaaatacaaggaaaagggtcaagttcaggcactgatgatgttggcatgggattttccagaatggcaactgactctcagtgaagcgctgaaccaaagaacaatcttctctagagtcacacagatgggatattcttgtattagaacaacattttaaacacttgttaatgctttcatttaaaagcataaaaatctagaccaggcacagagtggctcacacctgtaaacccagcaccttgggaggctgagttgggaagatcacctgaggtcaggagtttgagaccagcctggctaacatggtgaaaccctgtctctactaaaaatacaaaaattagctgggcgcagtgacacatgcctgtattcccagctactcgggaggctgaggtgggagaattccttgaacccggggagatggaggttgcagtgagccaaagtcacaccactgcactccaacctgggcgacagagtgaggctcttgtctcaaaaaaaaaaaaaaaaaaaaaaaagcgtaaaaatctaaagtcataaaggttaggttctaagcctggctaattacaaacagatttttacctccatgagtggcaggtgagacattggaagagtcataagggatatagacaaggattggcatcagagactctccaggtcattgcaggactcccaaaatatccttggccccactgttcactaacaacagcggcccccccccaacatgtgacaagccaaataatggcttccaccgatttccaaaatctccatagcagatgtgccgcctccactgagaagcactgcgtttgcatgttccaattctgtgcaatgtttctagcctgtcataaatggaagcacgtgcaagacaaatccctaaaaacatcctccactcactggcgtccctgccatcttgggaaggagagtgaagaaggtgcctgggccttgcctgtgaccagccggctctccctggctccatctgggatatggtcatcccaaatcactctactgcatgtttcccaatggggaaagtttgaaggttttgtcaaggactgagcaagcctaggggattgtgtccacacacgccaacacttcccaccatgttatgtcatgatgggggaaaaggatgaaatcctgtctcacctgttgaggaaacaggaaaagggttcatgccaacagatggaggattgggttccatccttggtttcatggcttagctgaggcaggtagatagggccatctttggagatacttgttgagcctctagggccaggaacatgagccattcctgcctaaaggacatcctacacagggcctgcttgggcagtgtggccaatgcatactcacctgtcccacagaaaaggtttaatccatagttggatgatgtggatgttttggagcagggtggggtctggggagggagccctctagcccctgaatatggaaaaaccttctttctgcttagggccctacctctcaggagcaacgtcacgttggacaagtcacttgatctcttttagccttagttttcccagctttaaaatggggatagtgggctgggtgtggtagtttactcctgtaatcccagcactttgggaggctgaggtgggaggattgcttgagtgcagcagtctgaggccaacctggacaacacagtgagatcctatctctacaaaaaaaaatttaaaaattagccagatatggtggtgcatgcctgtagtcctagctgcttgggagggtgaggtcatggggaaaaggggattgcttgagcccaggagttcaaggttacagtgagctgtgattgcaccactgcactccagccctcgctgacagagcaaaaccttgtctctaataaataaataagtttttttaaatagggatagccatgatggactacggtcattgcaaaagccgaatgaaattgatctgtgaacatgttttacacgttctgttgctgtcaggcctggggtggtttcagctcagcagatgttggttccgcctgacaacttgacctgtggggttctgagtgttcgcaagaatctccccgccccacctcccatcctctgtaccatctgcctcctgcttgcccacagcatggggttaacggctgaagttgggcagcaaagcctgaactgtgttttcctgttggcagggcaaattcatccgcatcaacttcgacgtcacgggttacatcgtgggagccaacattgagacctgtatcctttccctgagcctgggccaaatgggtacccctgccccctaccaatctcctgcccagaggctgggagagtccaagagccacctctatctttccagcctcttaggtttcttccagaacaaatctccccttaacagcaggcattgtggtgcagtggttatacatgtgtggaccggacccctggtttgaaccctaaacaagcagcctaggctgcatgtgatgctcaaatgatctgtcccttagctgagtgaccttgggctggttactccacctctctgtgcctcatcagcaaaatggggatgataatgaatggtacctgcctcatagaaatgtgagaatagagtgaatgaactcatataaagctctaggcaccatgcgaggtgcagagtaagggctggctacgtagtgtctatcgtatgatcttcacttcatccttattcagccattgtccgaggccaaattctggacctgtcgtcctcttagagagttggtctgtgatcggctccacttcttaggtaggaaattgatgaaaacagagtttacccagaagaatgctggtatcgcaaggaacaagtagagcatctctttcatgaacctgagcggtgaagtggagccaagttagaaatttctggacgtgggggaacaaccaggtctagagttcagtgactgatcagcctcaggagctttgcaggcggccctagggctcaggcttcctgtggaacacgtgcttggcaatgtataggacctgggggcctgacttagcttctttctgcacctgaggtcctctagcagcacctagtggtcccatttttccacgttatgtgccctggataagagggtgggttgtggagtagcttcctctccactgtacttgtctaagctgtggggatttgggaaaatcactgaagctctctgggcctcagttttgcctcggtaaaatgggggtgattgcacctagtttctggagctggtgcaggggttaaatgaaataatatgcataataatatgcacagcccttggtacggtactgggcccaaagtgagcatctcataggtggtggctattgcgttaactcaatgttttctacgtttctactttaatctgcccaaaccagccaggattcccatcctgcagctaggagggctgtcaggcttcggtcaagtccagagccagggccctcttgtcctgcagccctgcacacacctctcagcaattcatttcctgtgtttagagcgagccccaggcatagccccgtccttctggcctcagccttccttttagatcagtggttctcaaagtatgtttccaaaccagcagcatcagcatcacttgggagctctttagaaacacacatctcagccaggcacggtggttcacgcctgtaattccagcactttgggaggccgaggcgggcagaccacttgaggtcaggagttcgagaccacctggccaatatggtgaaaccctgtctctactaaaaatacaaaaattatccaggcgtggtggcatgcacctgtagtcccagctactcaggaggctgaggcaggagaattgcttggatccgggaggcagaggttgcagtgagccaagatcacacactgccctccagcctgggtgacagagcgagactctggctcaaacatacgtgcgtgtgtgtgtgtgtgtgtgtgtgtatgtgtgcgtgtgtatacccatgtacaccatgagaaagtctgagaatcactgctttccagattggacatgggctgtggtagcccgggcactgctagctggctttaggacttgaagaagacaaggtctgctgatctagccccatcatcccgcaccatcatgcttagtgctgtggaaatccacccagtacagtagcccagcctcccagctgccctctcccatcaccccggaccctgtgatctccatgccaccctcacctgccctcccctctgctctccctcctgccaccccgcatcgcggagaagctctcctgaaattaattagtgtggcgtgtttacggtctctctcgcctccatcccgtcagaccccactcttggaacagagggcatggaagacagctttgccacttgttagctgtatcatcttgagaaaggacttctcttctctgagcctcagtttccccttattgaaaacaccgataatagttgcacttatttcctagcatactttgtgaggcttcagtgagacaatttatatcaatcatttcacacaggaatgaatcataaatcataggatcatagatggtgtcattatttgtattctgtcatgtctgaagacagctcattttaaagaagatttgctggtgatggctgttaggggaacatctcgttaccattaccttcttcctggagcctttttatgctttttcttttcactctattcccctcccttttttttgcatctgaagtctgctggcagcacccagcggttccatttgtccataggggcaatggtcaaagttagacattaccgatcccaggggtagaactggaaagtcatcccatgtgaattgggtgtgacagggatggaggtggaagaccagaggaacacccgcagtatccccagaatccctaactccctccaaaccagatctgctagaaaaatcacgggcaattcgccaagccagagacgagaggacattccacatcttttactacatgattgctggagccaaggagaagatgagaagtaagtgactagcaatgacatgtgattggatggcttgagccttccctttcatcagaatccggggttaagggattggctattaaaacagtctcagatcctgccagaaaggaccatgtctgtgagtgacatatgaacagttcttcatctcctcccaatgagtgagtgtggcttgtgttcagtcattctcatttactgagcacctactatgtgacatagtagccatcaactccaattagacattagatcattaatgattcatgtctcattagaccagagagcatcaagtccaactagacacaatctacgccttcaaggaaagggagaaagacatttgccttacttgccaatttataaaacttgcaaatataaaagatgcattctggttttataaggaatttgcaggggcagcaggactaagcatttttcattatacatgttttgccagtgactttgtagaacaggggtcaagactttttctgtaaaaggccagatagtaaatcttcaggctttgcaggccaggtggcttctggcacagctattcaactctgccattgtaatacaagagcagccacaggcaatatataaaccaatgagtgcaggcaacacataaaccagtgagctcaggcaacacataaaccagtgagctcaggcaacacataaaccaatgagcacaggcagtacataaaccaatgagcacaggcagcacataaaccaatgaacataggcaacacataaatcagtgagtgcagatgcatcactgtgttacaataaaactttatttacaaaaacaggcagtgtgcagaagtttgctgacctctgttgtagggaaaagtttttttatgtaaatataatacactgtataccaaactccagtaggaagttatgagttctggacctgcagctgtttactaactcttaaaaatatatacaaatcgcatagcttaaaaaaggaatggatcagtgactatctgtacatagtagagtctacatgttagtaataagttttgagtctgaaattctatgggaacaatacagactttgcttcccatctcttttgtggcccaaggttagttattttggttaagacagttaccaaaaggatctgtgtgagctcagaacttcgctgtgtcggagtgtattgtagacctcagctactagggggtggcattatccattatttaaatttccagggtggggcaaagtggctcatgcctgtaatcccacactttcggaggcagaggcgggcggattacctgaggtcaggagtttgagaccagctcggccaagatagtgaaaccctgtctccccaaaaatacaaaaattagccaggtgtggtggctggcgcctgtcatcccagctacttgggaggctgaggcaggagaatcacttgaacctagaaggtggagtttgcagtgagctaagattgcaccactgcactccagcctaggcgatagagtgagactctgtctcaaacaataaaaataagtttccttaatggctggctttcaggaacataggctatgaggtggagcaatttttggtaaagggggaatgctgaatggattttttatgtaccagcaaacatggtatattagcagttacagtgcaggaccctgtggaatgggccagggaaaaatgttgacattccttttccttttatttggcacccaagaaaacagtttggttgtttggtaccttgggttccagttttgtgctttgcctctggtcttccagaaatgggcaagtatagggctcagaactaaattcccaggggccgtttgtattctagatgatagaactggaaagatgttaggcttttagaaagaaccaaatattgctaaatgcatccaaactcgggataatgaagtcttggcaaagacctcaatcctcgtgacttgaatcaggcatttcaagttaatccaaaagtttgagttaactggtgccttcagtcaatttaacctcgagtttatcaagcagcttccaagtgacttgacccataaaagaccttgattttgaaagaaaaatatcttgctgacgtctctccaaaagtataaccgaatccatcctaattaaagattgatctggaagaggatccttgatgtattggagggtataataaaagcaaatggtgcaggagaaagaaaggcaattataaagttgggggtgggggagaagctgaacaacaacaaaggaaatgtaatcataggatacagtttgacacagaatatctaattaatgtcataaaaagggagttggcaaactgtttttgctaaagggtcagtagtaaacgttttagactttaaggaccagatggcctctgttgcaactactcaactctgttgcctagtgagaaagcagccatgagaaataaacaaggacatcagagcagctgtgtttcaataaaactttatttacaaaaacaacaggggaccagatttgccaacctgtgatataagccttatatattgattcaactaaaaatagctgggggtggctgggcacggtggctcacacctgtaatcccagcactttgggaggctgaggcgggtggatcacctgatgtcaggggttcaagactagactagccaacatgatgaaaccccgtctctactaaaaatacaacaaattacctgggcatggtggtgggtgcctgtaatcccagctactcgagaggcaggagaattgcttgaatccgggaggcagaggttgcagtgagcagccaatatcgcaccactgcactccaacctggacaaaggtgaaactccctctcaaaaaaaaaaaaaaaaatagctggaggaaaggaaaggtagtataagaaagctgcatttttgcctaccatagcaggaagtcactagatactatctaaacttgacatatccagaaatcgcctattacagcgattgtgctttgcctctggtcttccaataggccaaaagcacctgttacttttggcactgaggactggtttcctggaagaaaagttttccacagactgggcgggcagggttggggggatggtgtggggatgattcacgtgtattacatttactgtgcactttattattacattgtaatatacaatgaaataattatactagtcaccataatgtagaatcattgggagcttgttttcctgcagtcccatcggggggtgatgggggacagtgacagattatcaggcattagagtgttataaggagggcacatgtgcagctcacgatagggtttgcgctcctatgagaatctaatgctgctgctgatcttatgggaagcggagctcagacagtgatgcaagcgatgggcagcagctgcaaatagcggataaagcttcacttgctcacctgctgctcacctcctgctgtgtggcccagttcctaacatggaccggtactggtctatggcctatgggttggggaacccttggcctatgatatgtaatacataatggtatatacattataataggctagtatatatagcaagcctattgtacagagagatagtggtaactgccagataaaaagcagctaaaagagataaaagcaggtattatggagtaaggtagagttggagaagggatgtgacaggagaatgctatttttcattataaacctttggtagtaattgatttttaaaactcatgtgcctgtttgaatttgataaaaattttataaatacatgaataaggccaggtgcggtggctcacgtctgtaatcccagaactttgagaggccaaggtgggtggatcacctgaggtcaggagttcaagtctagtgtggtcaacatggtgaaaccccatctctactaaaaatacaaaatttagccgggcgtggtggcgggcgcctgtaatcccagctactcaggaggttgaggcaggagaatcgcttgaacctgggaggcggaggttgcagtgagccgagatcgcgccactgcactcctgcctggacgacagagtgagactccgtctcaaaaaaaaaaaaaaaaaaaaaagagtaaaggttgatctaactcttctgacagctttgtctctgaaggctgaaggcagggtgcctctagacaattgaggtaaaggcatcccttcctccaggtaaatgtaacttcgtgccagggattgtggcttagcaagcagaaccaaggctggatatcagctgcagtcactggagcagtgcacaacctgcaccgctgtgtaaggctggcagtggttggtgaggctgtctacgtgacgatgcgtgagggctttaaacggttcaagccttgataaagggaaaggaattatgatggcccagacccttgaccagatctcggtctcatgttgaaattagaagtatgtcttattgaccctgacctgtcttcctctccttctaggtgacttgcttttggagggcttcaacaactacaccttcctctccaatggctttgtgcccatcccagcagcccaggatgatgagatgttccaggaaaccgtggaggccatggcaatcatgggtttcagcgaggaggagcagctatgtaagcctcacaccttgagtctggagggtagcttgcctggataccagtggaacctgttaagaactcttctctggtcaggacagatttctgctctctgaattccccaccttccattaaaaaaaaaaaaaaaaaaggaggaaaatgaattttattctaggtggtttgtttgtgttgtagaaaagtggctgtataactagggttgcaagtaacccgagctggcttaaaccaaagggaaagtgactaactcagaatgttgagaagttcagggaggttaggcacagtggttcaggtctgtaatctcagcgctttgcggggccaaggtgggcggatcactttaggtcaggagttcgagaccaacctggtcaatttggtgaaaccctgtctctactaaaaatacaaaaaaaaaattagccagggctggtggtgcacacttgtagtcctagctactcaggaggctgaggtgggaggattgcttgaacccggaaggcagaggttgcagtgagccaagattacaccactccactccagcttgggagatggagctagactccatctcaaaaaaaaaaaaagttcaggaattcaagcttcaggtacagtgagatctaggtgttcaaaagatttttctagaacctaatttcttgtcttctatctctctcgactacattgtttctctataggatgcagtttgttgacagcaacatagctgggttccagcccttatattctttgggtttatgtccaaagaacagagtagattcccggcttaagttcctgaatggagtgtcattgactctgattggttggcttaggttgatatgcacattcctgagctatgcagcataggcagggttgtggaaagcgcagggtggtttcattatggtccctaagaatggattcttggagctgaaggtagagatgttggcctcatcaggaacatgtgggcagggtttaggggagggggagtgatcgaggcagtggatttactcaggcttttcctggaggggttgctctggtgatcaattgatattgatcaaaatcatccaaccaatggccaagaaacacactgggtcttgagaacaggacagctcagaaagaaattcttggtcgggacactgtgtttccagaaacgattttccttctgcgttagatgtgcctcagtgttgaaggttaatctctttcaggaacaccaggacagaactgtggaaagtttcccttccttcccacgcctacgcccgtttggagccccagaatagcactgaggttgctgaaatgctgcataaggggaggggcagctcctccgaagataacttggggtctggaaaattaggctgtatgggtcagttgacaaatggatggtgtatgtgggtcttggccagggtcccacatcagaatctagtgctgatagcctccttgtctgaatgacataggccctccaagaatgattcatttcatttgggacaggggtcagttttgcttctaatcttgcttttaaataacaatgaacaatggttaagtatttgctgtgtgccaggaatttaccaaatccttttttcttgatgtactacactgttcagtatagttttatttaaataataaaaaactggaacaggctgggcacagtggctcatgcctgtaatcccagcatttggagacactgaggcaagaggattgcttgagcccaggagttcgagaccagcctggataacacagtgagactctgtctctacaaaaaaaataaatagaaaaaaactggaacaaactaaaataggttgattaatagagggtttattaaatcattgtctgtccttgtgaaagaaaacaatgagaccatttaaattgttttgctgggcatggtggctcacgcctgtaattccagcactttgagaagccaaggcaggcagatcacttgagcttgagtttgagactaacctgggcaacatggcaagatcccttctctacaaataatacaaaaaattaactgggtgtggtggtgcacactgtagtcccagctacttgggagactgaggcaggaagattgcttgagcccaggaggtcgaagctgcagtgagccgagatcacaccactctgtcacctaggctggagtacggtggcgcagtctcagctcactgcaatctctgccttgcaggctcaagcagtcctcccagctcagcctctcaagtcgttgagactacagacatgtgctaccacgcctggctaatttttgattttagggtttttgttttgttttgtttgagatggaggcttgctattgtcacccaggctggagtgcagtggcacgacctcggctcactgcaacctctgcctcctgggttcaagcaattctcttggctgagcctcctgggtagctgggattataggcgcccaccaccatgccccactaattttttttgtatttttagtagatactgggtctcgccatgttggccaggctggtcttaaactcctgacctcagatgatccacccatcttggcctcccaaagtgctgggattgcaggcatgagccaccgtgcctggcctggggttttttgttttgttttggtttgatttttggaggggtgggtagagacaaggcttcaccatgttatccagtattctctggtcttgaactcctgggctcaaacaatcagcccaccttggcctcccaaagtgctgggattacaggcatgagccaccatgcccagtccccagtgttctcaatgtactttggcacttgtttcccctttaaccacagagaccagactccaggcccagcaccttcggcagccccaagcatctagctagaatttggtaatactgttttccttgtatttatatttataattgccatctatttatggcaagtgaagatgatttgtcactgaagatagagaaagttttctattaaaacaaatgtaaggaaagagaaggaagtaaatttaaagaaaatgattaagcaaataatggagcagatggtacacagagcaagcattcagacgatggcgtgcaaatgacgaactctcataggaaccaacttagtcctaaatgtacaccaaccccatttataaaccaagagctacttccaaaccctccatcaaggggcctatggagaagggggtgggtcaggcttcaggctggagcttcatgaggctccaagtgaccaggggacaccaggattttccccaccacattgggttctgcagccttgaactcctggcctcaagatatcctcatgcgccaccatgcctggcctggttatactgcttctaatgtattttgaagataaaaaataaaatcacctaaattgtccatcctgtgtatccctggtggtacacatgtctgatgttggaaagtcctgtttcttattcctcagcaagaagagaggtgtaaggccactgtaaaaaattagcacaaacttgatgccttaaaacaacaggaatttattctctcccagttctggaggccagggttctgaaatcagggtgtcggcaggagccgggcataatggctcatgcctgtaatcccagcactttgggaggccaaggcaagaggatcgtttgaggccaggagttcaagaccagcctgagcaacatagcaagaccccttctctactaaaaatttaaaaaaaaaaaatttttttttttttaaaagacaagatgttggcaggggttgttcctcctggaggcactgagggagatctgttccttgcctctgtcctggcttctggtggctctggctgttcctggcttttccttggcttgtctcactccagtctctgcctcatccttcatgtggcattctactctgtgggtcttctcttctgtccatcataaagacacttgacattaaatgtagggcccaccaggttaatccaagatgatctcatcttgagatcttgtacttgattccatctgcgaagaccgattttttccaaaataggccacgttcaggctgggcgcggtggttcacgcctgtagtcccagctctcagggaggcagaggcgggaggatagcttgagcccaggagttcgagacctgcctgggcaatatagtgagaccccggtatccacaaaaaggaaaaaaaaataaatgtaaccccccaaattaggccacattcacaggttccaggtggacatattttagaaagaccaacattcaacctaatataggtggcttccactctttatcacctactaggccaggcccttgctcagcatcttacaagacctaaacttcacgaagcaggtactactgttaccatctccgttttgcagatagggaaactgaggctcatgggacttattgagactcatgtagagtctctatcctctattcatccatgattcatccatcaatccatcctctatcatccatctatcctctactcatccttccatcacccatccatccatcacccatccgtccatccatctacccacccatccatccatgaacccatcctctatacatttatacattcatccatccattcaccctccatctgccatccatccatctccctccctccccatgtgtatctggacccggaactaggatttggaaattcagagataatgagatttataagaagcaaagctgggatttgaactcaggactctctaactgcagagcgcgtgctttgcaccagcacaccaggatgctgccagccgtcaccacccttgctgtgttgtgtctcctcactggtttacttctttgctgtctgctaattctgccccaaggttcatctcttatggcctgggagtggtggcattcttttgtcatttctggaattacatttaactataccagaaagtgcaaaccaatggttcctgagcccacaggagagatcggccactacaaccttcaaaatttttagaaattggttcctaaagtttaaatatgggtaggccgggcactgtggcctataatcccaaccctatgggaggccaaggcacatggatcacttgaagtcaggagtttgagaccagcctggccaacatggtgaaactccgtctctactaaaaatagaaaaattagccgggtgtggtggcacacgcctgtaatcccagctactctggaggctgaggcaggagaattcccctgaacctgggaagcgcagaggttgcagtgagccgagattgcaccaatgcactccaacctgggtgacagcaagactcagtctcacacacacacacacacacacacacacacacacacacacacacaccaaaaaacatgggtacacttcacataaaaactctgggtttccattatctagaaaaatcagaagttccagcaacacttggcttatatcccctgtggcaatgacggagtagctgctggccccttcagatgggtttgtggcctccttgggtccccacagtcctcattagttggctttgttcatttagaccagtggttctctgccagaggtgagtttgcctcccaggggacattgagtagtatctggtgacatttgtggttgtcacaactctgtcagggtaaccaccactgacatctagtggttagaggccagggatgctactaaacttcccatgatacccaggacagctccccacaatagagaattatctggcccccaatttctgcagtgacaagattgagaaaccctgagttggccggctcgcctgggctgtgcaggcatttcaggaatctttagtttaaattgacacttttaaaactgtgagtgcaactcttcatagtttacaaagactctttcatagatgttatggttaaaaggaagtgtgtttccaagccctgtcaacagcagcttcattcattttggggagaaggctttctaccatagtaagtgggagcaaatggatgggtggtcagcagctgggtccttttgctgagctgggccagggaccccatggcgtgagaatagctgttgtgaagggccttgtaatgtctggtttggcctgaggaaccagagaagtctgggatctctaggctttgttcctggaacatagtgactgatttgaagccagaactctgggtgatttgtacctgagttaagctaagccaagaatttgcattaatcatcatccatccattcatccatctaccatccatccatcatctgtccatccatccattcatccatccatcatccatccatcaatgctgtatccattcctccatcaattctccatccatctatccatcgtctatccatcaatcctctgtccattccatctatccatctatcctctatccatccatccatcatccgtctatcctctatccatgaattattcatccatcaatccatcctctattcatccatctatcctctactcatccgtccatcattcacccattcatctacccacccatccatccatccgtccattcatccatgaacccatcctctatccatttattcattcatccatccatccaccttccacctaccatccatccatctctctccctccctcccatgtgtatcaggaccttggaataggctttggaaattcaaagatgattagggcaggccctccactctccagaaactcatggtcttatggggatttcagacatagaaactattttaacagtaacatggcctgagtatggagtcagaaaggttccaagtattctgggaacacagcgtttttgtttggagacacctggacaacaagtggaaacaaatgtatatcttcttcatcccaacatgggcatctgttacacccagaagagtatgtaagaagcacagggtttttatttcaaaaatccttttattgacatatgatttacatggagaaaattgtgtatgccatagcgtgcagtgcaaagaattattataaactgaacacgtctgtgtaactagaatccattttaaataagacaatgccaccagccccatggaagctcccacatgcaccttctaagaacttccctcaattaaggataatcattatcctgacttctaacagcatcgattagttttgcctcttcttgaatggacggtctatatatggacttagacagtatgttcttgtttccatctgtcctcttttgttcggtatttgtgtctggaagatatgtcagggttttttttttgttttagagacaggatctccctacattgcccaggctgtatcaagctcctggcttcaagcagttctcccacctcagcctcccaaagtgctggggtcgcaggcatgagtcactatgctggccccaatacatcagttttgatttgtggtagttgtagctcattcattctcactgttctgtggcaggggttgctaacacatttttctgtaaagggtcagatagtaaattctttagcctttgtaggccagacgatctttgttgcaactcattaactctgccagtgtagcatgcaaatagttacagacaatatgtaaatgaatgagtatagctgttttccactaaaactttatgtataatagcaagcagtgggccagatttggtccatgggctgtaatttgccagtccctgctgcgtggcattccattgtaatgcaaggttttaagcaaccatatgaaaatattgagctcagaatctagtttcttcagaggaaagatgtaagctggctctgggtccccagtggctttaggctccaaaactccagggtaccttggcattgacctttgtgtctgctctgcccttctctccccacctcagccatattgaaggtggtatcatcggtcctgcagcttggaaatatcgtcttcaagaaggaaagaaacacagaccaggcgtccatgccagataacacaggtacttgccactttttcctgatgaccaatgactttggggttgggggggtgggggaggtgacatttaaccactggttatttttcaaggtgaaggtatctgggattttaacaacagttggactaggttcttatcactcactttttcaaacttttcagtgctcaagaccctatgtggaaagttattgaatcagagcgcagggattaaaaaaaaacaaacctaatagttttatttatttgttcttttttttaaatacaaaattttacaagttttaatagagacgaggtctcgctgtgttgcccaagctgatcttgaactcctgagctcaagtgatcctcccaccttggcctcccaaaatgctgggattacaggcaagagtcatcacgtcctacccctaatagtgaccagacaagatcccgagggaccatctcttctaaaataccccacttaattgttttgttaaagaaatatttctcaagcccctgcaatatgccactgggatacagcaggaaatgacacaagaatagctcttcttacggtatctgtggtcgtcttggggagacagacctcaattgccctgagaattaggggtgccagataaaatacaggatgtccagataaatttcaattttaggtaaacaacaaacctttttttaaattttaattatgtcccttgtaacatttggaccgtgattataccaaaagagtattcttgtttatctgaaattcaggtttaactgagcatcctgtaattttccccctaaatctgataaacctacccacaaataaacagtattttgtgttttgagaagctggcctggctaccactatgcttgttggtggctgagctgagagcaaaacttaggtttcttatttcccagcccaggctgtatattgtgttgctttttcccgctccctagagcccaccttgatcaaacctgttgcaaccgcttactgggtttaccttgcccacagcctagacagagccaattaatcaagacaggggaattgcgatagagtaagagtaactcacgcagagccggctgcatgggagaacagagttttattattactcaaatcaatctccttgagcattcgtggatcagagtttttaagcataatgtggttagggggaggccagtgagttgggggtgctgattggttgggtcagagatgaaattacagggagtcgaagctgtcctcttgccctgagtcagttcctggacagaggccataagatcagatgagccagtttctcgatctgggtggtgtcagctgatccacctggtgccagggtccgcaaaaatatctcaagtactggtcttaggttttacaatagtgatgttatccccaggagcaatttagggagggtcagactcttgtagcctccagttacaggactcctaaaccataatttcaaacctttgggctaatttgttattcctacaaaggcagtctagtctccaggcaagaagggggtttgttttgggaaagggttcttgtgttttaaactataaactaagaggctaggcgtggtggctcatgcctgtaatcctaggattttgggaggcccaggcaggtggatcacttgaagtcaggagttcaagaccagcctcgccaacatggtgaaaccccatctctactaaaaatacaaaaattagccaggcgtagtggcaggcgcctgtaatcccagctactcaggaggctgaggcaggagaactgcttgaacgcaggaggcggagattgcagtgcgccgagattgtgccactgcactccagcctgggtaacagagtgagactctgtgtccaaaacataaaaaataaactataaactaagttcctgccaagttaattcggcttacacccacaaatggttcagtggagcttggaggttagaagcaaggtggagtccgttaggtcagatcttgttcagtgtctcagttataattttgcagtggcagtttcattctcaggtgtttgttatgtattagagtccctaaatctggcaaattaatggaatccggatgccaaggaaagacctcagggaaagagaaatgaaaaagtgctcttgccaagagatggggaaaaaaaaatcctaaaatcactctatttactctgccttgcacatgcaaagcagcatgtaatgctattttcatgttaagggaccagctcgtggtcacaccactgcacttcagcccgggcgacaggaagactgcatctcaaaataaaagaagagcatttaggttgactctagcattttgctattgcaaacaatgctgcaacacatatcctagaagggtgaaagaaatatttattgaacagtaactgttcaataaatgttactattaataactatttaatacttactaagtaactgttaaataaatctcaagggccagtggctcacgcctgtaatcccagcacttagggaggccgaggtgggcggattgcctgagttcaggacttcgagaccagcctgggcaacacggtgtaactccatctcaactaaaatacaaaagaaattagctgggtgtggtggcaggcacctataatgccagctactcgggaggctgaggcaggagaattgcttgaacccggaaggcggaggttgcagtgagctgagatcgcgccactgcactccagcctgggcgacagagcgagactctgtctccaaaaataaataaataaataaacaaataaataaataaataaatctatctatctcagggactttacatactttaccttatttagtcctgggtaccaacaaggtaccgaagagctgaccctttttaaagctgagaaaagcaagatgctgggagggtaaagagcttttccaaagtcacatgacttggaagtgtgaagggacagggacttgaaactagaactacctgaccctaaacccccaactggggcctgcttcagcccaccccaatcattgcctctcagcaaaatactggggagtgtgaccactaatgacagcagcctttaggacacttcaagctatattcatggtcagcgggtcccatttccccaagagaacccgctgtattcacagatcacaaatatcccatgcgatgtgtcttcttgccaagctatttcttttgtgatgcactcacgatgtttcttttctccatccagctgctcagaaagtttgccacctcatgggaattaatgtgacagatttcaccagatccatcctcactcctcgtatcaaggttgggcgagatgtggtacagaaagctcagacaaaagaacaggtaatgatgtacttatcacttatccatccatgcacccacccatccatccattcatccatctatccacctgttcactcattcatgtattcattaatccattcacccatggtctgcctctgcatctgtccatccatccatctttctacccactcattcatctgtctgttcatccatccatccatccatccattcatctgcccatctatctgctcacccatcatctctccatccctcactcatccatctgtccatccatccatgacccagccatctgtccatctgtccgtccatccatcacccatccagctgtcattccattcattcattcattcattcatctgtccatgcatccacccatccatctctttatccctcatttattcaatactagaatattcacagtcccatgtcaggttttgtttgtttgtttgttttttgtttttgagccagagccttgctctgttgcccaggggggggtgcagtggtgccatcgcagctcactgtagcctctgcctcccagattcaaacgattctcctgcctcagtcccccaagcagctgggactacaggcatgcaccacaacgcctggctaatttttgtatttttagtagagaagggtttttgccttgttggtcaggctggtcttgaactcccgacctcaagtgacccacctgcctcggcctcccaaagtgctgggattacagtgtgagtcactgcacccggccaagaataaaaatcttcaccaccagcctggcttatgtgaaaatggagcccattgagaataaccgggttcccctggttgccctctgcaggctgactttgctgtagaggctttggccaaggcaacatatgagcgccttttccgctggatactcacccgcgtgaacaaagccctggacaagacccatcggcaaggggcttccttcctggggatcctggatatagctggatttgagatctttgaggtacagctcggtgggatcctaagagccatggtcttggttgtctgagatgggctttttcttggaggagtcatgattttggagaaaggcatgtagatggctactgtagggtaggaggctgtctagttaagggtggatcattgagggtataagagacagaaatccaacaggaaatgcattggtttctggaactgagaaggccagacatgtagctggatcccgtaggcagggtctgatctcccgccatcgttctctctctctctctgccttcctccatattggctccattctcaagcaggctctcccctcacgggggcaagatggctgccacagctccagactgcctctcagtaatcctggtaaaaaaaaaaaaaaaaaaaaagcacatatctcttttctaacagttccaaccaaaatcttggaattaagtctcactgactcttactcacctgaattgggctacatggtcacctccaagccaagaactgtttgcaggagcttgcaatacctcatgtagtagaaacatggatattggatcctttacccatgggtttgaagaaagttctcagagaaagggaaggttttttttttgtcttgtcttgtttttttttttttgagacagagtcttgctctgtcgcccagactggaatgcagtgtcacaattttgtctcactgctgcctccgcctcctgggttcaagcaattctcttgtctcagcctcctgagtagctgggactacaggagtgtaccactgtgcccagctaattttttttttttttttagacagagtctcgctctgttgcccaggccggagtgcagtagtgcaatcttggctcaccgcaacctccgcctcccaggttcaagtgattctcctgcctcagcctctcgagtagctgggattagtgccaccatgcctggctacttttttttttttttttggtagagacagagtttcaccctgttggccaggctagtctcaaactcctgatctcaaatgatccaccagcctcggcctcccaaagtgctgggattacaggtatgagccactgtgcttggccaatttttgtatttttagtggagagaggtttcgctatgcttgccaggctggtcgcaaactcctgacctcaagtgatcctcccgccttggcctccctaagtgctgggattacaatcatgagcactacacccagccaggaggttttaagattgatagatgtcccgaaagaagtgtactaccgagtcactttctctctgcgcctctgttttcacatctgtaaaatgtttccacatctgtacatgcagtagcgtgccttacgaggtttgtccatccatagatggttgtgcagatggaggagataagcatctttaaggtgtgtgagggccatgtgatatcaacttcaccagccctggtggactctaggcagcatgttttggggcctcagccctgtctgggtgctgggatggcagaacaggatgtgggcgggccatgggggcgctgtcgggtggagcttctgtggggctccttgtcttctgacttcataccaagatgctcacgccccgcccccacgccatgtgctcaggtgaactccttcgagcagctgtgcatcaactacaccaacgagaagctgcagcagctcttcaaccacaccatgttcatcctggagcaggaggagtaccagcgcgagggcatcgagtggaacttcatcgactttgggctggacctacagccctgcatcgagctcatcgagcgaccggtgaggggcacgtgggcgtgcggggctccgtcacaccttgtacacgtgtgtggcctctgtggagccgacgtggaccccacactctccccatgcacatagcattcccccacccaatccatcacccagtcctgaaaggctgtaagctgaatccttgtgaactcttacaatttccattaacccacattttcatatcaaaggtattttctttaatttctgccttccttccatcctcttttttcttcctttttttcttccctaccctctttcccttccctttccttctctgccattgctttttttttttttttttttttttttatgacatggtctgactctgttgcccaggctggagtgcagtggcacaatcttgcctcactgcaacctccacctccctgcctcaagtgatcctcccgcctcagcctcccaagtggctgagactacaggcgtgcaccaccacgcccacctaacttttgtattttcagtagagacagggtttctactaattagccgggcctggtggtgcacgcctgtggtcccagctatttgggaggctgaggtgggaggattgcttgagccctggaggcagaggttgctgtaagccgagattgcgccactgcattccagcctggataacagagtgagaccctgtctccaaaaaaaacttttctaacaggaaccctaggtgaattcaagtcaagcaacaaattcatttgcaagaattatgaactcggccgggcgcggtggctcatgcctgtaatcccagcactttgggaggccgaggcgggcggatcacgaggtcaggagatggagaccatcctggctaacacggtgaaaccccgcctctactaaaaatagaaaaaatcagccgggcgccgtggcaggcgcctgtagtcccagctactcgggaggctgaggcaggagaatggcgtgaacccaggaagcggagcttgcagtgagtcgagatcgcgccactgcaccgtctgcctgggcgacaaggcaaaactctgtctcaaaaaaaaaaaaaaaaaaaaaagagttatgaactcttcatgatgttgcctgcgtgttgcccactagggggcggcagcaaacattatgttctgccttccatccctgttactggtccattgggcacagggtaatttgaaggtagatttggaagcatgggggtcataaactcatctttatatgtgggcaaatacagtatcagatctcggcggatgcccatgcgttgtgtatagttggccagctcttcatggaatgcctgaggttgggtgttctctctgattcaagccctacttgtctcccacagaacaaccctccaggtgtgctggccctgctggacgaggaatgctggttccccaaagccacggacaagtctttcgtggagaagctgtgcacggagcagggcagccaccccaagttccagaagcccaagcagctcaaggacaagactgagttctccatcatccattatgctgggaaggtaccagccacagggcccaggggactctgtctcaggggacccccagtggctgctcagcgcagagacagtctgagagtggcagaaccttgggctgcctggaaactgcaaagccatctgctgctaagcgaatcccaaccaagtcctattcgtaatttgtctacgcatctgtaaggcatcagctgtagccactctcatgttttccaaccgtgacgtccagacagttatttctttctgtttttgttggagacagggtctcgctttgtcgcccaggctggagtgcagtggtgcgatcatagctcactacagcctcaacctcctgggctcacacgatcctcctgcctcagcttcccaagtagctgggactacaggtgtacaccaccatgcccagctaaaatcttttttcctttttgagatggaattttgctcttgtcatccaggctggagtgcaatggcgtgatctctgctaactgcaacctctccctccgggttcaagagattctcctgcctcagcctcccaaatagctgggattacaggcacctgccaccacacccagctaatttttgtatttttagtagagaagggtttcgccatgttggccaggctggtctcaaactcctgacctcaggtgatccacccgcctcggcctcccaaggtgctaggattacaggcatgagccaccgtgcctggccgcccagctaaatttttaaattatgtatagatatggggtcttgctgtgttgcccaggctggtcttgaattcctgggctcaagagatctccctgcctcggcttcctgaagtgctgggattatgagcacgagccactgtacctggcctcagcctgcttttcttgtatagactctaaatccttcctgctacaagttatacccaacaggcggggccaactggaatggggtgactaatacatccacacctggcttcaacaaaaatctcccatgtcacggtcttgagtttgctattgccagcctgctctggccagggaaatctatgatagttgtattcatcatcatcatcatcatcatcaacatgccttggctgttattgtataggcccttgccctgtggctctcaagagtcctggataatgtacaaaggacatagcttagtctggcttgcagaattgtagtattctattgactcctcagtacctccactgcatcatgggcacaaacaatgctctctaccagggcctggcaacagagtccgatctggcccacagcttgttattgtaaataaagttttattggaacacagccatgcccatttgtatgcataatgtctatggctggctgcttttgtatactacagtgctagagttgagtagctgcgacaaagactgtatgacttggctgggtgtggtggctcacgcctgtaaccccagcaccaaggcaggtggattacttgaggtcagcagtttgagaccagcctggccaacatggcgaaagcccgtctctgctaaaaataaaaaataaaaaaaatttaaaaattagccagctgtgagattacaggcacacaactgtaacctcagctactcaggaggctgaggcaagagaactgcttgacccaggaagttggaggttgcagtgagctgagactgcaccactgcactccagactgggcaacagagaaccactctgtctcaaaaaccaaaacaaacaaacaaacaaaacattgtatgacttgccaagccaaaaatatctactatctgggccttcaccaaaagtttcccaactcctagcctatattcaagggggtatatgttcctttaagcatatagagacaacacttttcttttccctacttcatcagtggattttttttattattattttcagtcttctctcagatcaagcctacctattatcctgataacccacatcccatgataacccagcaaagctgtattatcagttcctttcatttaatattcaccatagtaaaaattacggctttgggcattgtcattgtttgagtcaggaatgtaaaaagcctatatgtcctttttctgtatatccatatatcaggatctctgagttacaaattatgctcattagagagtggaaaataggatgccatgcttaattaatttatttatttaattattttgagacagagtctcactctgtcacccaggctggagttcagtggcgcaatctcagctcactgcaatctccgcctcccaggctgaagcgattctcctgcctcagcctcccgagtagctggcattacaggtgtgcaccaccatgcctggctaattttttttttttttttgtatttttagtagacatggggtttcaccatgttggtcaggttggtcttgaacgcctgacctcaaatgatccacccaccttggccttccacagtgctgggattaccagtgtgaaccaccacgcttggctgccatgcttaatttctaaaccaggatgattgggaagatgatgaggggggagttttgcatgtcggcaggagggcatctgccgtcatgaaatctcttaatagtgtataactcacaggtactgtgctggcttaggaggagggaggctaccacagcagcgttagtaggagaatatggaatggaaactaggctttcccagcaatggctatcactggctgatgtcctactacgtgggcacaggtccctgggctgttggtctcttcactggtgtttgtggagtcccatcatggtggtcataaacgtcatttcctctctgacctcagaagatctggaaggacaatgggagggctggggtcctggccttggtttctaagtttctagtttcccaggggttctgaccagcagggtgtccttggcaggtggactataatgcgagtgcctggctgaccaagaatatggacccgctgaatgacaacgtgacttccctgctcaatgcctcctccgacaagtttgtggccgacctgtggaaggacggtaaggccttctctgctcgggtccatgttctgctttgagctggagaattgaacacccaagtcccccgactctcacacctgccccaggaggggaggcctttacatgggggcaggggaaggaagagcattggcatgggctggtgatgtctcgttgaaacaatttcttcctgagtgggggtccctgagcccctcaatcctacatgtcccgaggggattgaggtcctgaggtcagggctcaggcaatagaggagaaacagcatgccaggcacggggagttagactgccctgtccagagtcagaaggacttcactgtatcttgtctctgccacctcctagctctgtggtcttggatgagtcacttgatgtcattaagcttcattgtcctcattagtaaaacaggagatgcaataatagttgccgtctctactagaggtattatgagggttaaattagaccagtgatgctcaaactcaagcaggcatcatgaccccctggaaggctttgtttatttatttagggacagagtcttgctttgtcacccaggctggagggcggtggtgcaatcttggctcactgcagcctccaccttctgggttccagtgattttcctgcctcagcctcccaagtagctagcattacaggcacacaccaccatacctggctaatttttgtatttttagtagagacggggttcccccatgttggccaggctggtctcaaactcctgacctcaggtgatccgcccacctcagcctcaaaaagtgctgggattacaggtgtgagccactgcacctggccctctttggagggctttttaaaacccagatggctgggcctaccctaagatctaattctgcaggtctggggccagggatggggcgggcctgaaaacattcatcccaggtgatgctgctggtctagggaccacactccggctccctttgagaaccagtgaatagatgatccctgtgaagagctgctggagtgatgatgaggggagggggtttgctgtttgtccctggccatcagtgtccacagcaggttttattcttggcacagggcccatgggcctggggcttacaggactggtctccccttgttttaagcatgctaaaaaaagggctccaggaggggccagctgtgccctaaccatatgccaggctctgggcctagggaacaacatcgcaccctgggtctgtgtcatcccaggacacatgatgaagcctgtagtccctcctctgcgggacccacagtcttgtgggagagatgagactctcaaagacaagcagagagacaagcatgaggctgcgcatggtggctcacacctgtaatctcagcactttgggaggctgaggcaggaggatcagttgaggtcaagagttcgagaccagtctggccaacgtggcgaaaccccatctctactaaaaatacaaaaactaactgggcgtggtggtggtaatcccagctactcgggaggctgaggcaggagaactgcttgaacctgggaggcgcaggttgcagtgagctgagattgtgccattggactccagcctgggcaaaagagcaagactctgtcttgaaaaaataaaactaaaaataaaaaataaaaacaaaattagccgggtgtgctggtgggtgcctgtaatcccagctactcaggaggctaaggcaggagaatcacctgaacctgggtggtgaaggttgcagtgagccaagatcgtgccactgctctccagctgggcgacagagtgagagcttgtctcaaaaaaaaaaaaaaaaaaaaaagattgttacacagaatctgagtagaaggtgaagaaatggtgccatccatggcctgtgggttgggcttggcatgtgcaggacctgctgggctggtagaaaaagaaccttggaggtgatgatgatgatgatgatgatgatgatgatgatggccgggcgcggtagctcacgcctgtaatcccagcacattgggaggccaaggcaggggaatcacctgaggtcaggagttcgagaccagcctgaccaacatggagaaactctgtctctactaaaaatataaaaaaaatgagccgggcgtggtggcgcatgcctgtaatcccagctactgggaggctgaggcgggagaattgctggaacccgggaggcggacgttgtggtgagccgagatcacgccattgcactccagcctggccaacaagagtgaaactccgtctcaataaaataaaataatgataataataataataataataataataataataataataatacctactttttgttgagcacttactgatgtgccaggctatctcggagtgtgtgctgtatcttctgcctcagaatatttcttccgtggatacctacatggttacccactcatttcttgctggtttctgctcaaatatcaacttagcagagcccaccacctccttgtctaagagagcaccctcttcactctctctccgctttaccctatttttatttttctacgcacacctcactactcaagatattccatacttaacatctgtgatctctgtctgtctccttccctgtgatataagcggggtgagggggccgggtctttttttgttcacagcagtgtccccagggcctggagcacagaaggtcctcaataactatttgttggtggatgaaagattggaggctggcagggaataagtgccttctgtgccttatttttttttacccctgccctagaaggtagacggtattattacctcccttttgtagaaagggagactgaggcacaggatagtgccaagccaaggctagtcagtgagtggacagcgagagcaggcttgactcctaggtcagcgtgactccatcacagggaatttgttctttctgccactcaggtgctctcaggatttccccaatagacaatacttggaaaccctgactgccgaaggaggcgttggtgatggaaggaaagattggagtgggcaggttggtgggtggggctggggctgagcctctggcctatttaggggtgggtgggccagaggctgatgccaccctggctgtgccccatagtggaccgcatcgtgggcctggaccagatggccaagatgacggagagctcgctgcccagcgcctccaagaccaagaagggcatgttccgcacagtggggcagctgtacaaggagcagctgggcaagctgatgaccacgctacgcaacaccacgcccaacttcgtgcgctgcatcatccccaaccacgagaagagggtgaggcccgccgcccagaccctggggctcccagaagccagggctgtcccaagcggtcacagcgtccccagggcgccctctgcccccacctaccccgaggaccccattttccatgtggggaaggctatctgaatctcagacccattccccatccctggaggaaaaggaggaagggaggatgcatccagagacttttcagttgtggagttgctgtgcaggtcatccagccactcattcattcattatcccaggaagtattcactgggctctgccctgtcctgggtgctggggagcagtgttagaaaaattgtagcccttccctgtgggtttctcataatctggtgcaggcatcttcagcttggggcgattgtgtcctctatatggacatgctacagacatttttggttgtcacaaccaggagggggctgttagtcagcatctagtgggtaggggccagggatgccctaagcattgtacaatgcacaggatggtccctcaacccccagcacagaatccctacaagatgccagtagtgctgaggttatgggagacacggggagaggtaaacatacagctgatgatggtgatggaatgtggtcagttaggagaacaccaaagagccagggctcctcccacagcctcaggactcagagaaagcttctggtgaacttgaacgttaagaatgtgtggccatcaacttggtgacatggaaggcagggtggggcctaggataagcagggggcctaggataagcagagggcccaggctaagcaagagtgtggaggtgagaagtgaaggaactaggtaagaaaatgctagatagtgtccaggcgtgttgctcacgcctgtaatcccagctactcaggaggctgagaaacaaaaatctgttgaacccaggaggcggaggttgcagtgagctgagattgcaccacagcattccagcctgggcagcagagcgagactccatcttaaaaaaaaaaaaaaaaaaggaaagaaaatgctaaataggtcatttcatgttgcaaatgtgtgatggcatgaggtaggaatcagatggtgtgaggtaggattgaggctgaatgggtaggcaggggctagatcgtggtgctccttgtgttctttctggagcttggccttctctctctaggcatgccattgggggtgttaaagcagggctatatcatggtcagatttacattttaggaagtgaatgagggggctgggcatatgctagctcatgcctataatcccaacactttgggaggttgaggtgggaggatcacttgagaccaggtgttcaaggctagcctgggcaacatagcaagaccctatatctacaaaaacatttttaaaaattttccaggcatggtagcacatacctgtggtcccaaatacttgggaggctgatttgggaggatcacttgagcccaggagtttgaggctgcagtgagccatgatcgcaccactggactccagcctggctgacagaatgggaccctatctcaaaaaataaaaaggacaaagggattgaggggagaggcaagaccagagagagagaccaggtgggtggtttctgtggttgtccaggcaggagaagatagtggagacaatggtggtgaagagaagtgggggggttgggagatatttgggagctagaagcaatcaaactgctgatggacaggaagtgagggagacgaggtgatgaggaggaagccccaggttccagccaggcgatgctagtgtcaccaagaaccagagagatcatgaggcagccattgccgaagcaaagagatgaaaacccagaggggggcactgctttgcccctcggccctcagctaagccctccttgggtgcttctgttggtaccctcatggcctggccaggtgggtcatccaggtaggaggtttggggctttgctgcgccatggtttctggccccagggatccactgccctctttgacctttgcagtccggcaagctggatgcgttcctggtgctggagcagctgcggtgcaatggggtgctggaaggcattcgcatctgccggcagggcttccccaaccggatcgtcttccaggagttccgccaacggtaagtcccaaggtctggcccaggtagggcagggggtgagcgggactgggtggaggaatggatgctggaggtacccggggtgacttctgctctgtgtttcaagctacgagatcctggcggcgaatgccatccccaaaggcttcatggacgggaagcaggcctgcattctcatggtgagcccagaagtccaccagagacctcccaacctctggccgcaagccacctgctgctcttggtgggaccgttcttacccatgtcatcactggccaaatggcacagtggaaatcaggagctcttcctttccttccttttgcagatcaaagccctggaacttgaccccaacttatacaggatagggcagagcaaaatcttcttccgaactggcgtcctggcccacctagaggaggagcgagatttgaagatcaccgatgtcatcatggccttccaggcgatgtgtcgtggctacttggccagaaagtaaagatgctttcctgcatcctaatacctcaaacgcgaatcacaaacaggggcctttctgttctgattccctgattctaagaggccacctgtttaagatgcatcattgactgaatgacagccttttcttgaaggggaagaaatgcttctactttaaataaatgtaccaagttacgagtgcaggaagggaacgagttttagacctgggttctcatcgtggatgccccagtttttgctgatgaaccttgggcaagttactctacctctctgagcttccagttttttagctggaaactgagcataatcattttgacctcagagagctgttcatgaggtgtcactaagataacgcatgacgagagcttagaacagtgcgtggttctcaggtcagaaatgattgttgttgtttttacctccctccctcactccttccttccctccctcccttccttccttcctttcttcttcctttttgagacagagtctctctctctctctctgtcgcccaggctggagtgcagtggcgcagtctcaactcactgcaacctctgcctcttggactcaagcaattctcgtgtctgagcctcccgagtggctggaattagaggcgcccaccaccacactggcctaatttttgtatttttagtagagacaaagtttcaccatgttggccaggctggtctcaaattcctggtctcaagtgatccacctgccttggcctcccaaagtgctgggattataggcatgacccactgcgcccagcctagacatgttagaattggataaaccattgaggaaagaggacttgacggtgtctagatccccgtgtcccagtgggatttataaggcagggttttggagggtgtgatgtcccagctgttctgtgaagactgggagccggggaagggttcgggttccttaatgaaagtcataccccagggactgcagggacaggtggggtcgctctctgtctggggtgtgtgttgtcattgggcagagaccacaccctcaccagtaggaccctgatgtgtcaggttcattcattgacacatggacccaagatggtcaaggccagctttgggagctcttggccctcccgcaacagacctaacttgtcaagtttcgttactaagttccctgttgctgtccttcctggataactggggcaattttattcttaaagttttcctgtgtccaagatggcagccaagcagggaagacagaattacgttcactgttctatcgtttctcaatctatcgatagcccttaaacgggaagagtgctggttcagggtcacagtgtgaaattcctaaaacaacccaggagagaataggtttgacagggctgggtgtggtagctgacacctgtaatcccaggcactttgggaggccgaggcaggaggattgcttgagcccaggagtttgagaccagcctgggcaacatggcgagacccctatctctaccaaaaaaaaaaaactttaaaaattagctgggcatggtagcatgtgcccgtagtcccaactacttgggaggctgaggcaggaggatcatttaagcccaggaatttgaggctgcagtgagccatcatcacaccactgcactccagcctgggccgcagagccagaccctgtctctgaaaataaacaaataaataaataagttagtcagaaacagctggtgtaggctgggcatggtggctcctacctgtaatcccagcactttgggaggccaaggtgggtggatcacctgaggtcaggagtttgagacccacctggccaacatgggaaaccccatctctactaaaaatacaaaaattagccaggcatggttgtgggcacctgtaatccaagctactcaggaggctgaagcaggagaatcacttgaaccccggaggtggagtttgcagtgagctgagatcgtgccaccgcactccagcctgggcaacaagagcgaaactctatctcaaaaaaaaaaaaaaaaaaaaaagaaagaaagaaaaaagaaacagctagtgcagctggggagtacgggagcccccttaggaatgatgcacatagttgtgttttctgagtggtgtttggatctcagctaagtccagggcatgttgtgagccctgggtcttccttgtccactgaaaaaggctctgtcctgtagatgatttaagttgtttgcagccagacaacacatgtgtcacacagggtttctggaagaacctgagttggggagattggggcatgtccctgtgcaggttcaggatgctgcagggcagggctctgttgacagcagggtgtggcttcatgacccccgcaccttctcttcccccctccctagggcttttgccaagaggcagcagcagctgaccgccatgaaggtgattcagaggaactgcgccgcctacctcaagctgcggaactggcagtggtggaggcttttcaccaaagtgagtgctctgccccagcccccttcccaggggcccccagccctgcttcttcactctggagccttcacatttgggacaggaggtggtcgcaagtgggtgtggaatggagggctcgaactcagaccttgagcattggcggttctctggcccgaggaggccctgtcctttggcacataggctatagccaggaccttaacacaaagtattaatatttccatccgcactggaatccctcgtgtggcccatttatagccacacccacttcctccgtagccatggaaaccactctgttctccagttctgtaattttgatggttcaagaatgctgccgggggcggcggctcacgcctgtaatcccagcactttgggaggccgaggcaggcggatcacttgcggtcaggagttcaaaaccagcctggccaacatggcaaaaccctgtctctacttaaaatacaaaaattagctgggtatggtggcaggcacctgtaatcccagatactcaggaggctaaggcaggagaatctcttgaactcaggagacagaggttgcagtgagccaagatcatgcctgcactccagcctgggtgaaagattgagactctgtctcttctttctttttttttttatttaaaaaaaaggccaggcacggtggctcacggctgtaatcccagcactttgggaggccgaggcgggtggatcacaaagtcaagaaatcaagaccatcctggccaagatggtgaaaccctgtctctactaaatgtacaaaaattagctgggcgtggtggcaaacgcctgtagtcacagctactcaggaggctgaggcaagagaatcacttgaacctgggaggcagaggttgcagagagctgagatcgcgccactgtactgcactccagcctggtgacagagcgagactccgtctcaaaaaaaaataaaacaaatattctatacatggaattagagagcatccagactgttgcatgtatcaatactgcaggtttttttttttttactttttgcattttttgaaatggagtctcactctgttacccaggctggtcttgaactcctgacctcaagcaaccctcctgcttcaggctcccaaagtgctgggattacaggcatgagccacctcatctggccatagcatattattttttatttctggcagagtcagggcctccagaggactcaactggttcctgtagtggcactggttgcattgtccccatggcacaaagacatgctctgttgcaatagactaggcttctccttatatgcccttgagtgtatccactggtgcaaggctttttcaccaagcaaacagacattgagtgcctgctgtatcccaggcacatgctaggtgctgggggtgcagctgtgaacacacaccatggtccctgacctccatgaatattctagccgaattggtggggagtaaacaataaacagataatcacagagacagatacataatggcaaactgtgataagtgcatgaagcaagctgctggagtacatagcaggggcttccttgtgccaggcaggggcttgaaaacaaagagttaggaggcagcccagggaaggacagcagatgctgctttttggaaatgttcgtccccactgaaccaacttctgaaaaactatcctaagaaaatcgtcttagccaggtgtggtggctcatgcctgtaatcccagcactttgggtggccaaggcaggaggatcacctgggttcacgagttcgaaaccagcctggccaacatggcgaaaccctatctctactgaaaatacaaaaattagccaggtgtggtggtgggcacctgtaatcccagctactcaggagattgaggcaggagaatcacttgaaccgaggaggcagaggtttcagtgagctgagatcgtgccactgcactccagcctgggtgacagggcgagactccacctgaaaaagagaaaagaaaatcaagagttaagggcattcattatggccttatttacaatagcagaatttcagtgtccagtcctagctgaatgatgagttcaataatggttcatctatcaatggaatgttttcagctattaaaatgatggctttggctactgaataggtctgctaaaaaaaaaaaaaaaaaagacttctacctagctgtctagttggacactgtggcatgtgcctgtagtcccagctactctggagctggggtgggaggatcgcttgaggccaggagttcaaggctgcagtgagctatgattgtgtcactgcactccagcctgggtgacaaaacaagaccatcgctaaataaataaattaacttaaaagatggctatgtaaagttgtaagaatgatgtaacagcatggggtaatacatatcttataatttttaaaaaaattttatttgtggagacagggtctcactgtgtcacccaggctggagtgcagtggcacaatcgtggctcactgcagcctcagcctgcagggttcaagcgatcttcctgcctcagacccctcactagctgggactacaggcacacaccaccatgcctggttacttgtttttgtagagatggggtctcatgatgttgcccaggctggtcccaaactcctgggctcaagcgcttgcctcggcctcccaaaatgctgggattacaggcatgcatcactgttcctgtctgtatcatataattttaaataataaaagcagcctctacaactaggcagcatggtcttaagtctattttttaaacatagaaaaagagccaggaaggaaatgtaaacaatgttaataatgactttgatagggaggtgggtgggatatgaaagattttttttctcccttttgtccttggaaggaaatatcacttttcagcagtagttctctgttgggatggttctaaagtggggaagatgagactttttcctttcactttgtaccttttctggtgctctgatttagagctcctcagtcttgccactgttgatattttggggtgactaattctgttgtgggggctgtcctgtgcactgtagggtgtttagcagtatccctggcctctacccactggatgccagaggcaccccccaccccagctgtgacaatcagcagtgtctccagacaatatcccctagtggggatcggtgggggcaacattgtccctggctcggaaccactgatcgaatttattatgacaacatatccctttgccacaaaaacaaatgatgggctaaccgtgtgtgtgcaggtgaagccactgctgcaggtgacacggcaggaggaggagatgcaggccaaggaggatgaactgcagaagaccaaggagcggcagcagaaggcagagaatgagcttaaggagctggaacagaagcactcgcaggtacctgtatggatgcatggctggggttgctggggaacaggacttggccccgtggggctcacccgcctcctccccaccacctgcgtgcagctgaccgaggagaagaacctgctacaggaacagctgcaggcagagacagagctgtatgcagaggctgaggagatgcgggtgcggctggcggccaagaagcaggagctggaggagatactgcatgagatggaggcccgcctggaggaggaggaagacaggggccagcagctacaggctgaaaggaagaagatggcccagcagatgctggtaaggtgtcacaggggcagcccgtggtgggtagcaaatcacttgaccctcaccacaggcctgtggaggtgcatccagggatatgtgtccctgctgggacagatgatgagacgggggcttggagagggttggtcatctgatcaaggccacacagctgggattgggactggaacacagtgagcccactctgttctattgccctgccttgcatgtgctaaccccttttctcctaacagcaagcctgaatggaggataattgtatttgttagctattgctacataacaaaacatgccaaactcagcagctaaaaataaaaagtattgcatagtcaggaatttgagagtggcttaggtgagtggttctggctgagggtccggcctgaggttgcagtcaaggtgttggctgaggctgcagtcatctgaaggctcatctggggctggaggacccacttctacttggcttattcacacagctgttggaggaggcctcagttccttatcatgaaggcctctcccctcagggctgcttgagtgtccttccaatatggcagcagagttcccccagaaggagtgatctgagagaggagaaaggaagccgcaatgccttttatagcctaatctctgaagttacattccatcacttcttcctgatttttgttgttgttgttagaagcaaatctaacccccactcaaggggaggagaattaggctccacctttttggagtcgcaaagaacttgtggatagattttaaaaccaccatggtacctactgtgctcattttatagatgaggaggttgaggttccatgaagcagagcagcttacccaggtctttattttttttttttttttgagacagagtctcactctcttgcctaggctggggtgcgatggtgcgatctcagctcactgcaacctctgcctctcgggttcaagcgattctcctgcctcagcctcccgagtagctgggattacaggagcccaccaccatgcctggctaattttttttgtatttttagtagagacggggtttcaccatgttggccaggctggtcttgaattcctgacctcaagtgatccacccacctcggcctccaaaagtgctgggattacaggtgtgagccaccacgctcaggcctttatttcttccttttaggaggctacagagttctgggcatcttcaggcctagcccctgtattcattagtccccagatcaccacgagagtaaatctgttataaccaaagctgttactcttttccctccacaacaaaggaccttgaagaacagctggaggaggaggaagctgccaggcagaagctgcaacttgagaaggtcacggctgaggccaagatcaagaaactggaggatgagatcctggtcatggatgatcagaacaataaactatcaaaagtgagtaggggccgggtgcagtggctcacgcctataatccgagcactttgggaggccaaggtatgtggatcacttgaggccaggagtttgagactagcctggccaacagggtaaaactccatctctactaaaaatacaaagattagccaggtgtggtggccagtgtctgtaatcccagccacttgggaggctgaggcaggagaatcacttgaacctgggaggtagaggttgcagtgagctgagatcgtgccactgcactgcagcctgggtgacagagtgactctgtttcaaaaaaaaaaaaaagtggaatcaagtttctgcattaaaaacaacaggcttaccaggatcagggagattttggggatttgggactttcagttctcaaagcagaaaagcccttagaaaaccaggacaagctggtcaccgtagtcagtagtcactaaccagccccacctgcttttagttctttgagctggatgtcagcttggcccctactgtgagccaggctctgtgttagatgcaggtatgcatggtgaaggaggacccttcccttgtggggtttatactgtagtgagatggcaaataatcgtcatttaccatggtgatcagggctctgaaggaaacgttcaccatattttaagagtgcggcaggccgggtgcggtggctcatgcctgcaatcccagcactttgggaggctgaggcaagtggattacctgaggtcaggagttggagaccagcctggccaacacggtaaaaccccatctctactaaaaatacaaaaaattagttgggtgtgttggcgggcgcctgtagtcccagctactcgggaggctgaggcaggagaatcacttgaacgtgggaggcagaggttgcagtgagctgagatagcaacactgcactccaccctgggcgacagagtgagactctgtctcaaaaaaaaaaaaagaatacagcagtgggggatagaggaagggtattcatagaagacttcctggaggaggtgacatttaagcagaaacttaaagatgaaggagcagttagaggggagtagaagagcatctcagctggttggcccactgtgcaaaggccctggggcagggaagagctggccagtggcaggaatggaaggagggtacctttagctgaccatacaatatgagggacaaactggcacgagatgagaaatggccagtttttggaaattgttatgggacttctctttaccatttaaaactctagttgtattttgttataatgtgggtttttctttcaactgtttacatggaaatcactaaaagtgaaacatagattctagagaaaagaaaaatcctaaagctatctctttctctttccccaaaaaggaacgaaaactccttgaggagaggattagtgacttaacgacaaatcttgcagaagaggaagaaaaggccaagaatcttaccaagctgaaaaacaagcatgaatctatgatttcagaactggaaggtaaaccagctaccaagagatttatttttattttattttattattttttttagagatgaggtcttgctctgttgcccaggctgcagtgcagtggtgcgatcatggctcactgcagcccgaaactcctaagctccagtgatcctcctgcctcagcctcctgagcagctgagactacaggcgtgcatcaccacacccagctaatttttttttattttttattttgtagagatggggtttcactatgatgctcagtctagtctcaaactcctgggcccaagcagtcctcccaccttggcctcccaaagtgctgggattataggcatgagccactattcctgggcttgaatgggtatttttaaaagcaggaaaatcagaaaggaaatttgaggatggcagatcatcccatgagtgacaactaactctatgccacctctcgaaatcacccttagtcatcacatgcactaataatatgataaaagggctgggtgcggtggctctcgcctgtaatcccagcactttgggaggccgaggtgggcggatcacgaggtcaagagttggagaccagcctggccaacatggtgaaaccctgtctcaaaatacaaaaattagccaggcgtggtggcgggcgcctgtaatcccagctactcgggaggctgaggcaggagaattgcttgaacccgggaggcggaggttgcagtgagctgagattgcgccactgcactccagcctgggcaacaagagcaaaactccatctcaactaataataatattatgacaatataaggtgctgttcatcgggagataatggtccagaccgtgactatgatggttactgattgggggatgtgttcatctcctccgggtaaaatgcctgggcaggaaggctcatttccgggcatctctctggggcctccccttcctgaagagcaccttggtttttgcagtgcggctaaagaaggaagagaagagccgacaggagctggagaagctgaaacggaagctggagggtgatgccagcgacttccacgagcagatcgctgacctccaggcgcagatcgcagagctcaagatgcagctggccaagaaggaggaggagctgcaggcggccctggccaggtagcggggctggcaaggggcatttgctgtgtgtccatgtatcccctgggcccctgctcattcgctcattcgcagtggctgtcttggtcaaggcggccccaggcccttggcatgaacttcgtttcccaggccaggcctcccacaagccttctcgaccctgttcactcccccagatcctcaccttcgactttcttctcttccctgcaaacacatcatgtctttgcagttgatctcacctactcccatggtgttgctgctgcctcttcgacatccaggcttttctcatctagacccccttctgaatttccgattgcccaatgagtcaatttccaccgtcatctcaaacacccctgtctaaggcgggaatgaccttcctttccccagcccctccctctaagggccctcttttttgtgaacaccaatctcctcctttgtttctgccgacccacagcaagcagcaaccttcagattctgccagtccttctaaatgtcccccacccatttcctctggtttttccctcttcctggctcttagctggatttacactaatgctaatactgcagcagccactatgaatgattatttacctgctcactcggtgctaagttcttttcaagcaatacctttgcagacacctggccaggtgtactgccggtgtctttgaggaggaagctgagcctcctaggggtaacgcaacaggagcaatgtcattgcttctaagaggcagagctgggatttaagcctcaaagctttctgattgatcccctggcctggctcttttgtcggccaatttgtgctatgttgacagtgctacggtgatgaagggaaagcatctctctggggcaggaacctgctcacaaaactttgctggctggatgcagtggctcacgcctgtaatctcagcactttgggaagccgaggtggggggattgcttgaggccagcagtttgagaccaacatgggcaacatagcaagaccctgtccctacaaaaagttaaaaaatgagccaggcatggtggtgtgtgcctgtagtcccagctactcaggaggctgagatgggaggatcacttgagcccaggaggttgaggctaaagtgagctatgatcatgccactgcactccagcctgggcaacagagcaagaccctgtctcaaaacaataataacaacaaaacaaaaacctaacttcactggcttactagggaaaatccagtttccttagcctcaccctcagagcccatccaccctctgcagtctcaccccaacccaactatttcactttctctcttgttgctgccctttcacaagtacagtaaaatcaaagtgcttgcctctcctgcagcattctgccatttaacagggcttcttgcagcccaccttgatctctggtcaccacctccaccagatgcagagccccagtctgaatatcccccgcaagcagtggctggccaaatgctgtgcatggggcgggtactcagtcactgagcaaatgcagaaagaacagacagttgccagggaagaagaactgtccaacattcagaaagcatctacacagtccctactgtgaccaggtaccttgccagtctggggtcaatgctttgcattcttgcacacacatgcacacacgtgcatacacacgtacacacacccatgcacatgtacaacctgttttgatgtcagaccttggcactcacatcctatgttaatctcatatagtctggcatgtcaagaagcagacctggggacatggatagaaggtgtttgatgtctctgcaacataactgtctggtcccagaaaagtttttggccacattgtaagagaggaaaccaagggacctgggggttcattctgctgggtctctccctggaaggcttgacgatgaaatcgctcagaagaacaatgccctgaagaagatccgggagctggagggccacatctcagacctccaggaggacctggactcagagcgggccgccaggaacaaggctgaaaagcagaagcgagacctcggcgaggagctggaggccctaaagacagagctggaagacacactggacagcacagccactcagcaggagctcaggtgaggggcccatcaatcccaccatcctgctatcccactgcaccaatgggatgggggcagaagaggggacaaacccaaagcaaatcgtgcatcagcccctgtgcatttaccttcctggccgcggtttgctttaacttatagaagcatggttggctgtttcttttttttctttcttttttttttttttttgaggcagtctggctttgttgcctaggctggagtgcagttgtgccatcttggctcactgcaacctccacctctgagatttaagcgattctcatgcctcagcctcctgagtagctgggattacaggtatgtgccaccacacccggctaattttttgtttttagtagagatggagttttgccatgttgcccaggctggacttgaactcctggcctcaagtgatccacccacttccgcctcccaaactgctggtattacatgtgtgagccactgcacccgaccctcatcatcttatttctcatcagaagagtagtatataccagggatgtacaatcttttggcttcccttggccacattggaagaaaaagatttgtcttgggccacacataagatacactaacactaataatagctgatcaactaaaaaaattttacaaattggaaaaaacatctcatactgttttaagaaagtttatgactctgtgtcaggctgcattcaaaaccatcctcattggtaagcttggatatactcagagaacaatttgaaaactatagaaaagcagacataaaaaaaaatcacctttagggtcgggctcacgcctataatctcagcactttgggaggccaaagacaggtggatcacttgaggtcaggagttcaagaccagcctggccaacatggtgaaaccctgtctctactataaatccaaaaattacctgggcgtggtggcgcatgcctgtaaatcccagctactcaggaggctgaggcagtagagtcacttgaatctgggaggcagaggttgcagtgagctgagatcgcaccatcgcactccagcctgggtgacacagtgagtgagactccatctcaaaaaaaaacaaaaaacaaaaaaatcacccttagtcacaccagttaacattcttgagaaattccttcctgtctgtgtgtgtatcagtcagtccccaagctccaattcccaagtatgtgtgtgtatcacttttgtgttaaattttaaaaataaaattgatcagattggttttcaattgaagattcacttcaaatgaacaaacaataacaaactgcctgccagatcacgaatcctgactctagtgaaactaggtcattgattcattcagtaaacacataaatgtattttgatgcaatctgtggtgttggcatagcatgtatcatagcatatagctatgctagctgtgccaacaccatataccctggggtttacttcccccactttgggttttgtgcagtgtcacatgcacatagagcacagcgttctgctcccttgccgcttggcctttgatacagaagagcccagtgcatgggccaggtatggtggctcatgcctgtaatcccagcactttgggaggctgaagcagacagatcacctgaggtcaggagttcgagaccagcctggccaacatcatgaaaacctgtctctactaaaaagacaaaaattagccgggcgtggtggtgggcgtcggtaatcccagctacttgggagactgaggcaggagaatcccttgaacctgggaggcagaggttgcagtgagctgacatcattccactgtactccagtctggacgacggagcaagactcgataagaaaaacaaacaaacaaaacaaaaaaccaggctgagtgcggtggctcacacctgtaatcccagcactttgggaggctgaggcgggtggatcacctgaggtcaggagttcgaaaccagcctgaccaacatgttgaaaccccatctctactaaaaatataaaattagccgggcgtggtggtgggcacctgtaatcccagctacttaggaggccgaggcaggagaatcgcttgaacccgggaggtggaggttgcagggggccaagattgcgctgtcgcactccagcctgggcaacaggagtgaaactccatctcaaaaacaaacaaacaaaaccatggactcaaggtcaaggtttagcttctaattctggctccatcacacaatggctgtgacaccatgggtaaaactgcttaccctctcttagccttagtttcctcatttgtaaaatggaaataataacacacctgcctctttgggttgctctgaggattagatgatgtatataaaaaacttagctcagggcctggcatatagtaactgctcattaaataagagccaacattaatatttaagcaaaattttgcagttcacagacatcctttcaattctattactttgtgtatttgtttgccagtcattacagatgtcctaggcaggtgatatgctccacattttgcagctgaggaaattttaggtccagagatgttaggtgaatgacccaaggtcacacagctagagaggggtggtgatgaggactgcagctctgggtcctggaagagctctcattcttttgcacggcactgagatgaccctctgtctccacccaactgccattcactgtgttcctcccaccaagggccaagagggagcaggaggtgacggtgctgaagaaggccctggatgaagagacgcggtcccatgaggctcaggtccaggagatgaggcagaaacacgcacaggcggtggaggagctcacagagcagcttgagcagttcaagagggtaatgctttttggtgatgctttttggtgatgacacataagagtgacatcagcagcctcaaattactacaggtcagggtctgcataaagacaaaaaacaagttacataagattctaatgatgatgatagcagcttatatttatttacaaaatgcttcccatacaggctgggtgaggtggctcacgcctgtaatcccagtacttggggaggctgaggcgggaggatcgcttgagctcaggagttggagaccagcctgggcaacatagtgagaccttgtttctactaaaattttaaaaaagtaggccaggcgtggtggctcaagcctgtaatcccagcactttgggaggccaaactgggtggatcacctgaggtcaggagttcgagaccagcctggccaacatggcgaaaccctatctctactacaaatacaaaaaattagccgggcgcggtggtgcatgcctgtaatcccagctactcgggaggctgaggcaggagaatcacttgaacccaggaggcagaggttgcagtgagcagagatcatgccattgcactccagcctgagcaacagagcaggattccatctcaaaaaaataaaataaaataaaatattggccaggcctggtagtgcattcctgtggtcccagctatttgggaggctgaggtgggaggatcgtttgagcctgggaggttgaggctgcagtgagccctgtcatgccactgcactctagcctggacgacacagtgagaccttaatcaaacaataaaaataggctgggcacggtggctcaccatgtctgtaatcccagcaatttgggaggcaaggcgggcaaatcacttgagctcaggagttcgagaccagcctggccaacatggtgaaaccccatctctaccaaaaatataaagaattagctgggtgtggtggcatgtgcctgtaatcttagctactcgggaggctgaggcaggacaatcacttggacccaggaggaagaggttgcagtgagctcagatcgtgctactgcactccagtctgggcgacagagtgagccgccatctcaaaaaaagaaaaaaaaaaaagaatgaatagaaatgcttctcatacagtatgtcaattaatcttcacaaccaccctgtgagacgtgtactattaaactcattttacaagcaaagaaactgaggtcctaggtgcctagaggtgaagagacttacccaaggtcacactgctggtaagtgacagagccatgatttgcacccaaacagtctggtcctagaccccactttctggcctctacaggactgaaggcctataggatgggtggggcctatcaatatactgcccttcagggataagcaaaggtgtaacaacactttcggggagatttaaatgaaacttaaaactgggatcattctatccactttaatttctctgcagactggaggaaggccaggcatggcggctcatgcctcccgtaatcctaacactttgggaggccaaggagggaggattgcttgagcccaggactttcagatcgcctgggcaacatagcgatttttcttttgtaaaaaaaaaaaagactggaggaaacttgtcattatttgatttcaatggcagaacagctctctccggcataatttgagaatgactaggtcaaatcactctcccgttgttggaactctttgcggtgtatgggagtgggagctggtaaatagcagtaccgaatgctgaatcttgggtgctcttctctcctttggggtagtgcctgtgcttcattccccagggtaagttttttagcttgcgaccttcggccagattgttttcctgaaagcctgagttacattaccctcagcgttgcagctcctccacatccccttcagtggaagcttttggttctgctagattaagtgggtgcagcattgcctaaaaattttggggaatttgcatttggttctatcactagtgtattggtccgttgttgcactgctctacagaaatacccaagattggattatttgtttattttttgagcagtggagtcttactctgtcactcaggctggagttcagtggcgtgatcttggctcactgcaacctccacctcctgggttcaaatgattctcctgcctcagcctcccaagtagctgggactacaggcacacaccaccatgcccggctaatttttttttttttttttttttttagtagagatggggttttgccatgttggccaggctgatctcgaactcctgacctcaggtgatccacctgccttggcctcccaaagtgctgagatgacaggtgtgagccactgcaccaccctgagattgggtaatttctaaagaagagaggtttaattggctcacggttctgcaggctgtacagaaagcatagcagcttctgcttctggggaggcctcaggaaacttaccatcatggtggaaggcaacggggaggcaggcatgttttacatgaccagagcaggcagaagagagagaatggggagctgccagacacttttaaacaaccagatctcatgagggcagcaccaaagggatagtgctaaaccattagaaactgcccccaaaggccgggcgcggtggctcatgcttataatcccagcactttgggaggctgagataggcggatcaccaagtcaggagttcaagactagcctgaccaacatagtgaaaccccatctctactaaaaatacataaaattaggctgggtgcagtggctcacgcctgtaatcccagcactttgggagcccgaggcaggcagatcacctgaggtcaggagtttgagaccagtctggccaacatggcaaaaccccgtctctactaaaaatacaaaaattagctggacgtggtggcggtcgcctgtaatcccagctacttgggaggctgagacatgaaaatcacttgaacccaggaggtaaaggttgcagtgagccaagattgtgccactgcaccccagcctgggcaacagagtgagactcagtttcaaaaaaaaaaaaaaaaaattatggttggaagagtgaggccccagacagaatcactgaccctccccatgcttggggttcattagacgtgaacaggagctagaagccaagcccattcccagccaggcctctttgggaagacgcagttattaagaccaccagcagacggcatgtccattactgacccgcacaaagcaggtagaggtgcaaacctctgcccatctcaggtgcagggaaacagaggcctttgcctctaacaacttgaattctgatgtagagacctggttccatctgcttgtgggggaaacgtttaacatcagctcctacctgggctccccaggccctcgtgcggtttggccccagttctggggtcttaggctgggctaaggtttctgggagcccatgtcccctagggtccccgcttcactgctttgttaccaccaagagactccctgtccccatctgaggtctggcagctcttagtcatgtcttggagggaggacgggcatccagggctgaccggtcaacgtccagcacctcccagggactatgggaagactgagtggtgggtctcgtcctctcgggatacttgcgcttctctttccccttctctacaacctggaaagaagcccctcaccgcgtcctacttttgcccaacacgcttttttttttgagacaaagtctcactctgtcgcccaggctggagtgcactggcgggatctcggctcactgcaacccccgcctcctgggttcaggcaattctcctgcttcagcctcctcagcagctgggattacaggtgactgccaccatgcccggctaatttttatatttttagtagagacggggtttcaccatgttggccaggctggtctcaaactcctgacctcaagtgacctgcctgcataggcctcccaaagtgctgggattctaggcctgagccaccgcgcctggccccaacacactttttttttcctgtagggcaactcacatgcctacaggagctggttccataaaataagtttcccttaactaggacagaagtagcagtgtcaatcacacgacacctgtgaaggacgggggcggtgaaaggtgactgccccacctgcagagccagccgctacttagatgtggcagattgttgccttgaaggaaagcaagaccctctgtttccagatctttcgttgttgttggttttttgtttttgtttttaagtttaggattactgaggcatatgtagtaaaatttatccattttactgctccattaattttaacaaatgtgtattgtgtaactaccaccaccacagtcaccacatagaatgttagttattgattgattgattgagatggagtctcactctgttacccaggctggaatgcagtggcatgatcttggttcactgcaacctccacctcccaggttcaagcaatacttgtgccttagccaccccagtagctgggactacaggcgtgcgccaccatgcccggctaatttttccatttttagtagagatgcagtttcgccatgttggccaggctggtctcgaactcctcacctcaagtgatccacctgccttggcctcccaaagctacttatttctgaaacagggtctcactttgttgcccaggctggagtgcagtggtgtgatcatagctcactgcagcctccaattcctgggctcaagcaagcctgccatccgcctcctgagtagctgggattgctggtgtgtgccccccacacccagctaatgttttattttagtagagatgggggtctcactacattgcccaggctggtcttgtactcctggccttaagcgatccttctgcctgcttcccaaagtgctggggatgacaagtatgagctgccatggcatgccttcaaacattaaagttttttgaaaaagaagctgggaatccagatttttatgtgacatttattaaaatgtcggcaactcatttttttaaaagtagtgaaagggtcaaaggggacatgtcagcaggttggataccgcttgtgggattccagattgcaacccatgagctttaggaaaatagaatccaaaatatcagctgggtgcggcagctcacgcctgtaatcccagcacttagggaggccaagatgggtggatcacttgaggtcaggagttcgagagcagcctggctaacatggtgaaacctcgtctctactaaaaatacaaaaattagtcgggcatggtggcgggcgcctgtaatcccagctacttgggcagctgaggcaggagaatagtttgaacctgggaggcggaggttgcagtgagccaagattgtgccacggcactccagcctgggtaacagagttaagactccatctcaaaaaaaaaataacaacaaaaaaaccccaaatctcttactggtgattgtgtgccccctgttgtgtgccttcctggacctctctgagggaggaaagggcagggcctgaaacgttctcccggccacagcctccctgttatccctcccctctgcttccttcgccaggccaaggcgaacctagacaagaataagcagacgctggagaaagagaacgcagacctggccggggagctgcgggtcctgggccaggccaagcaggaggtggaacataagaagaagaagctggaggcgcaggtgcaggagctgcagtccaagtgcagcgatggggagcgggcccgggcggagctcaatgacaaagtccacaagctgcaggtgaggaggtggcgcggtggtgtggtgggcagtgctgggtggtgcccagttctgtggggaggagcctcttcccggctcgctgaggtctctcttgctgcaaggcaagtcctttcctctagttgcgttcctggaggagaggcgatgatctccctgttcaattaaatattaaaaaaaccttctggccaggcacggtggctcatgcctgtaatcccagcactttgggagacagaggtgggtggatcacctgaggtcaggggtttgagaccagtctggccaacatggtgaaaagtctctactaaaaatacaaaaattagccaggcgtggtcgtgggcacctgtagtcccatctactcgggaggctgaggcaggagaatagcttgaacccaggaggcagaggttgcagtgtgcggagaccgcaccattgtactccagcctgggctaaaagggcaaaactctgtctcaggaaaaaaaaaaaaaaagaaaaaaaacccttccttttccaatttgataagtatttattgagcacctgctgtatgccaggcactgtgcttaatcctgagatccaacagcaaggaagaagagacactgtcgctgccccagtaggactccagccgagtaaggggaagggaagggaagggaaagacatgaataatcacacaaatgaatgtcaaatgatgcagcaaagggaaggcacatgatgcccaagtgtaaataaccagggggcctaacctgggggaggaggagccacgaaaggcttccctaaggagcatggataagtctaccaggcagagggaacagcgtgtgcaaaggccctgtggtaagtagaaaaattaggagagagacatacagccagtagagctggagtgcccagctggggttgggggtagggggagatagtacagagtggggttggagggggagcttgtacccagatgatgtagggcttttgagaacctattacatgtatgttgatccttactctgggcaatgtgaagctgttgaggggttttaagctgctgaatgacatggtctttttgtctttggtcttctttcacttggcatagccatttaccctgccttgccactcatggggacgtggccaaagttttcacaaatgtttaacatgtccacagccagggaccaaggggcgagggaagaattaagtgagatgtttttttctcacatgcagttgagagcagggcttttgccgccctcatataagcagtgtcaagatcattcatatcctccttgtcaatggaagagatggaggggtaggctaacagcctcaaagggacttatgcagagacactagggagtaaaagccagagaatacagagaggacgtttttacctttagggcctgcgtctctggctttggccatcagggtcaaagagtaggagtgaggaaggaagggatgggacagcatccctgggacgttcaagtaccatcctggtctcccttctccagccttagagagtggaccagccagagcacctcgtctggactctcagacctgctgctttgtctctaccaaccttggcagggatctaggatccatttagtgggatcaggtcccagtcaataccattggggctcaaataagttcttagaaccacagagtctagggccagggtcccaactcataggtgacggagttcccttcaagccacagattctgttttttttgtgtgtgtgtgtgtttttttttttttttatcagagtcccatacctcacgggtattttctcaatcagtgaacacctcaagtactagcccatgtgttttgagtaaaaagggctcctttcaacgaggatccccttctagaggctttgactaaccagtctcttggcacccttagaatgaagttgagagcgtcacagggatgcttaacgaggccgaggggaaggccattaagctggccaaggacgtggcgtccctcagttcccagctccaggacacccaggtgagtgtcctgccacatcatccaggggacctggggggtggccttcctcggggcaggtccctgggacctctttgcatcccttttgcaggagctgcttcaagaagaaacccggcagaagctcaacgtgtctacgaagctgcgccagctggaggaggagcggaacagcctgcaagaccagctggacgaggagatggaggccaagcagaacctggagcgccacatctccactctcaacatccaggtgcctgccccgtgtccttgcttccttcatgggtcctctcaacttctctgcgctgagatcccccgcaggcagatcgcggtggagtgttggtgcgatggtgcttgaccccccagcttcccctgctattgggtttctccaacgaggagacatggtcttcgcttctcagagtctgtggggccagggacaggggccactcatggtccccctctcaccctaccctggacgctgtccttgtagctctccgactcgaagaagaagctgcaggactttgccagcaccgtggaagctctggaagaggggaagaagaggttccagaaggagatcgagaacctcacccagcagtacgaggagaaggcggccgcttatgataaactggaaaagaccaagaacaggcttcagcaggagctggacgacctggttgttgatttggacaaccagcggcaactcgtgtccaacctggaaaagaagcagaggaaatttgatcaggtagagggcgtggggtgtcccccactctggccatggacgctgggttggggaatcagctctgcagagtatgacgcgtggctctggcctgtgcctgcatcccctctccactctgtggggagccatgggaggctgtcttatcttgtcttgggcgaccatggagcattaacgctaccaggtcacagtaaggatggcaaagaagccttgatgactgtgacttttctgggtaccagcaccatgagggtcacctgcacacatggtgatgccttagtttctagcctgaagaaggaatgaggtgcttatttattcactaaatgtatttactgaatacctattgagtagtattccaagtaattcagtttctatacttttaataccactcttccctaagatttcattctgtaaaattccaagtacacagcaaagttgacagaattgtacggtgaacacctttaaggccaccacctggattcagtcattgacactgtattatatgaactttatcagatacttattttgagacaggatctagctctgtcacccaggctggagtgcagtggtgtgatctcagctccccgcaacctccaccactgggttcaagcgattctcctgcttcagcctttcatgtagccgggattataggagcacaccactatgtctggctaatttttgtatttttagtagagatggggttttgccatgttgtccaggctggtctccaactcctggcctcacatgatctgcctgccttggcctcccaaagtgctgggattataggtatgagccactatgcccggcccacatatttatttataaagactaattctatctatcatgccttatctcttgggtacatttcagagcaaattacagatgtcagtacatttccccttccacacctcaacattgcatattaattagagtttatttttaaacacaattttgcttcttttggggtaaaacttacatgtgatgagattcacaaatcttaattgtacgataaatggagacccctgtatgacccaaacccctaaataccaacttttaagatacattattatttagtaaatatgatttagtttacaagtgactcagggttattctaaaaatcagtttgagaggccaggcacggtggctcacgcctgtaatcctagcactttgggaggctgaggcaggtggatcacttgaggtcaggggtttgagaccagcctggccaacatcgtgcaactttgtctctactaaaaataccaaaattagccgggcgtggtggcgcacgcctgtaatccctgctactctggaagctgaggcaggagaatcgcttgaacccagggtggggtggaggttgcagtgagccaagattgcgccactacaccccagcctgagtgatggagtgaaaaccctgtctcaaaaataaataaaatgaggattgtacagtgaggctaaatgccagatgcctgcaggttccctacccctccctgactgacctcctagtgtcaggattctagataacatcccagtttctcctcttcccatcagctacctctcctctgggctgtcagctcatcttcaatgcttcgttatctggttgaaggcctgaggttgcttttattttcctgtcacatagagtgtagtgcagtggcacacatagtgtgggatttttgtgttgactgtgccatttagaggtccctgtctttgctgaatactggaagtttggcttttggatgttacaatttataatctgctctgttctctctgaagatgagattaacgtgagcatggaatgttctctgagttgcttctccaagcagagagatatgtgtgcagggccacccatgcttaccatttccctactgaggctcttaggatacttttgtaagatattaatagctacttgtggccatgaaacaaactaataactagcttctggcagctttaaatctcactttgacctcagtgtgctctaagcaacgtgggcaggtctagtggtttcgaagcacaaggatttggccaggtgtggtggctcacacctgtaatctccgtgctttgggaggccgaggcaggaggctcacttgagggtcaggagttcgagaccagcctggtcaacatggcaaaaccacatctctacttaaaatacaaaaattagccaggtgtggtggtgggcacctgtaatcccaactactctggaggctgaggcaggagaatcgcttgaacccacgaggcggaggttgcagtgaaccaagactgcaccattgcactccagcctgggtgacaaagtgagactccatctaaaacaaacaaacacacaaaccaacaaaaaaaaacaagtcagctgatttctggctctgcataaggttgatgtagaagtcagaacgccagatgattatataaattactcccatagctaacctacactgcttacacctgcacctcaatacattcagcaggacacagggcttcccccggtatttacaattcagtgacgctgaccccggatatgcctagaagtcacctctgggtcttgtgttgtagttgttagccgaggagaaaaacatctcttccaaatacgcggatgagagggacagagctgaggcagaagccagggagaaggaaaccaaggccctgtccctggctcgggcccttgaagaggccttggaagccaaagaggaactcgagcggaccaacaaaatgctcaaagccgaaatggaagacctggtcagctccaaggatgacgtgggcaagaacgtaagtggctctgggtggtttttctcgtccatgtttcgcctgcccaccctctgtgctattcaccagtccatgcgaggctagctcctggcctttttcatagcgaactatcatcggaaatggaaggaggtttttggactggtgcaggggctgggaggggctgagaatggcagtcgaggatgggtctgagttggggggtccgaggataaggctggggtctgaactctcaggggtcatcttgagtcccggccatgcatcctgtgggaggccaaagccacctccctgatctcctgaggtgccgctcacggtgggtttctcaatcgtcttcatgaagttgagcctcatagaatggggctgcccgctctgccggcaggtccatgagctggagaagtccaagcgggccctggagacccagatggaggagatgaagacgcagctggaagagctggaggacgagctgcaagccacggaggacgccaaactgcggctggaagtcaacatgcaggcgctcaagggccagttcgaaagggatctccaagcccgggacgagcagaatgaggagaagaggaggcaactgcagagacaggtgcgtgctgccggggaggccagcagagggaggtcgggtggcctttttcattcctatcaccactctcatggttggtgtggaaacttcgttttctttatttttttttgaaacagagtctcgctctgtcgcccaggctggagtgcagtggcgtaatctcagctcactgcaacctccacctcctgcctcagcctcccgagtagcttggattacaggcgcatgccaccatacctagctaatttttttttttttttcagtggagacaaggtttcaccatgttggccaggctggtcttgaactcctggcctcaagtgatccattctcctgttggcctcccaaagtgctgggattacagacatgagccacccacgcccggcgtgattccgttttctcatctgcaactggggatgagatgcccacctcacaagggggctgtgctggggaaggggtgcagtgatgtgctgcctaggtgagccaaaggacctcccaggggcaagtggggcagcacacatctctattcctcgcccagcttcacgagtatgagacggaactggaagacgagcgaaagcaacgtgccctggcagctgcagcaaagaagaagctggaaggggacctgaaagacctggagcttcaggccgactctgccatcaaggggagggaggaagccatcaagcagctacgcaaactgcaggtgggtgacactaggagcttggggcatgggtggagggagggcacagttcccctcaggccaccgaagtcagcagagcgggctccaggaagcaagcctgcacctgccattggtgtgggttcagctggggtttttctggaaccattcaggatttggtggctgtctcctgccctgggtagggcagcattattaggtatttggccactgccctcagatcacatcaggggctcagcttctcaggcaggtctgtggagcccacccagaatggtgctcccagcgcaccaccagccacctggaactgagagccatgctcgtgcaatgggaacttctttgtggtcaactgcagaaaatccaaggggtgggtgtgcaaagctgaactgggcagcagaacttgggggagtaaggacatctgagcttgtcctccctgttgactcatgcaggctcagatgaaggactttcaaagagagctggaagatgcccgtgcctccagagatgagatctttgccacagccaaagagaatgagaagaaagccaagagcttggaagcagacctcatgcagctacaagaggtaaagcctcgccttgctaggagagcctcagatgcgggtgtcacggtagcaccccttggcagctccagtctgtgcattcccagatttcatttcgtcctcctctggggtccacctgtctagaaagacacacgcttccctcctctatgtattcacggggcctcccctgagctcagaggaagaacatgtactttcaagggtggctgagttgtcagggtggactcttggtggggcttggcctttccctggcagacaacagccttcctccctcccacctaggacctcgccgccgctgagagggctcgcaaacaagcggacctcgagaaggaggaactggcagaggagctggccagtagcctgtcgggaaggtaggaaactgaatggaggaagagggctctgaagcagaggatggggggacaggcagcatcctcgacccccattttattttttaaattttttcgagacagagtttcattctgtcacccaggctggagggcagtggcacaatcttggctcactgcaacctccacctcccaggttcaagcaattctcctgcctcagccttctgagtagctgagactacaggtgtgtaccaccatgcctggctaatttttatatttttagtagaggtggggtttcaccatgttggccaggctagtcttgaactcctgaccttaggtgatcctcctaccttggcctcccaaagtgctgtgattacaggtgtgagccaccgtgcctggccctggacccccatttcaatgctgctgctgacgaagcgtcctctgagattggggacagacccatggtggttaggttttccgtcagcgctttcatgcctgtttgggggtgtggctgctttcattcattcccaataagtagctgtgtggggagaaggggaggccaggaagagtcagggaggagtgtgctggtccccatcccaatcccagctttgctgacacggacccggcctgagtcccggctgtccacttcctggctgtgtaactacagatgagtcttctaatcttctccaagcctcagtttcacccattagatgatgagggcaatacccctgaggcatgactccaaggagggggcatcttttaaggcgggggagggtagaggcccccaccatggccgcccttcccccaggaacgcactccaggacgagaagcgccgcctggaggcccggatcgcccagctggaggaggagctggaggaggagcagggcaacatggaggccatgagcgaccgggtccgcaaagccacacagcaggtgagggccgcctggacaccacagtcacgctgcctactgtctctcctgcagcaggatcctgcaccagtcaacacacgcgtggcggcttcctgtgtgcaggccctggattgagggacaagagggtggtggggcctgagagtagagatccagggcccttacaccagtgcccaggctgctgtcttcagaatactcctctccacgctgcagtgtctcattttccagccacggcgtggctggctccccgtacctcacggccatccctggagtccgggccttgggatgctctttcattgcgttttcccctagctgaagctctgaccttatccagtgagcccttggtgatgtcactgagcactagttccatggtgggcactagggaccatccagtaacctgcagccccttgtggtgtagggtgaacaggcatcattctccaggcgactccaggacagagaaagcaagggacaagtcactcgctcagcctgggtggcactgacacttgtggaagcacctcttttttttggagacagggtctctctgtggcccaggctggagtgcagtggcgcaatcttggctcactgcaacctctgcctcccaagttcaagggattctcctgcttcaacctcccaagtagctgggactacaggcacgtgccaccactgcccggctaatttttgtatttttaatagagacggggtttcaccatgttggccaggcaggtctcgaactcctgagctcaagtgatttacctgcctctgcttccaaaagtgctgggattacaggcgtgcgccaccacgcccggcctggaagaagctcttgagtggagttttacaggatgaaggagaggacagggtgcccgggatcaagggactcgtgcagaggccaaacaaggcaggaagaggcatggtctcagtgcgctctcttgggcttccctgagtccgcctcatggccttcactctcctccccaggccgagcagctcagcaacgagctggccacagagcgcagcacggcccagaagaatgagagtgcccggcagcagctcgagcggcagaacaaggagctccggagcaagctccacgagatggagggggccgtcaagtccaagttcaagtccaccatcgcggcgctggaggccaagattgcacagctggaggagcaggtcgagcaggaggccaggtatgcgggtgtggagttccgaacccagtttgcaggggggtgatggacagcaggagtcatagtgaagtcagggaacctcttccagcatcagttctggcttgtaagaagcaagctctgtgatgcctacagtgcaggtatgttgtgagaactgaacgtaaacacagcaaagtgccctgctggttcctggcctagggcaagcacctaaagtgtgagctgctcttagcatctccatggtcctcctgacattaacctgccttcccagcagtacatatgacttttcccagcctctgcagggatagcatgctgacagatcaaaaatccaaccaggctggacgtggtggctcacgcctgtaatcccagcaatttgggaggctgaggcaggtggatcacttgaggtcaggagtttgagaccggcctggccaacatggtgaaaccctgtctgtaccaaaaattagccgagtgtggtggcacatgcctattatctcagctactcaggagactgaggcaggagaatcactccaacgtgacacgtggaggttgcagtgagccgagattgtgccactgcactgcagcctgggtgacacagtgggacccttccacacacatacacacacacaaaaaaaaccccaaaaaacaaaagtccaaccggcagcccatttggtacacacactggaagccttcttaattatgggtcgaatgaggcatatgatcacagcacatttcttaccattggattctaaggattctcacccattctcttctagtagctttttcagtaattcgcacgccctgcaatgcacccatttaaagtgtataattcaagggctattcatatattcacaaacatgtaaaaacgatcaccacagtcattttgagaacattttcatcggctcaaacagaaaccccaggccatatgtggtatttcatgcccataatcccggcactttgggaggctgaggtaggtgggagcagcacttgagtccaggagttcgagaccagtctgggcagcatagcaagacttttttatttttatttttttgagacatagtctcactctgtttcccaggctggtgtgcagtggtgcgatctcagctcactgcaacctccgcctcaccctcccaagtagctgggactacaggtgcacaccactgtacccagcttgtaattgtattttttagtagggatggggtttcaccatgttggccaggctggtctcgaactcctgaccacaggtgatctgcccacctcggcctcccagagtactgggattacaggcatgagccaccacgcctggccagagactccgtttctatgaaaaacttttaaaagtctgagcatgctggtgtacgcctgtagtcccagctacttgggaggctgaggtgggaggattgcttgagccaggagttcaaggctgcagtgaactatgaactagggtgaagagcaggcattggagcaccactgcactccaacctgggtcacacagcaagaccttgcctcctccccgcaaaaaaaatagaaaccccatgccctgtaaccactcccttcagtccctggcaaccataatctactttctgtctctatgaatttatctattctggacacttgatatcaacggaatcacacactatgttgtctgctatgtgtcttctttcacttggcaagaattccaggctcatccatgctgtggcatgcattgatactttattccttttcatggctgaatactattccaccatctgactgattcttgagaggagtccagatacggggctcaggaaagcactcaagatgccacctccaggtgacacaccagctacaaggggtgccaccctccgctgaaaccacctgttttccttgctgtttgcagagagaaacaggcggccaccaagtcgctgaagcagaaagacaagaagctgaaggaaatcttgctgcaggtggaggacgagcgcaagatggccgagcagtacaaggagcaggtagcccctgccacccagcctccctcgagcccccagcccccagccggcctcccctaaccacccctccaactctccgcgacaggcagagaaaggcaatgccagggtcaagcagctcaagaggcagctggaggaggcagaggaggagtcccagcgcatcaacgccaaccgcaggaagctgcagcgggagctggatgaggccacggagagcaacgaggccatgggccgcgaggtgaacgcactcaagagcaagctcaggtgaggagcccgtggcccgggaggaccccgtctctcaggccagagaaaagcactgggggctcgggctcctttcggcctgcaaatgccccttgtgcccacagccgccactcccttctgtggtttattcctgcttctccttaatcactaagcttagtgtgggccaggcactgagatcagacccgggccctgccttgcctggtagcagctaaccttctagatcctttaacgatcgaccgtctcccatccggtcctccggctgaggaggaggaagaggctatccccactgtctcctccagcccctccttcattgcatcactgagtcttcacgacatccattgaagctgcaacaccaccccccgccacttcacctccttcctgacatgctctgctcctcctttctccccctcagcactgctgccatctgggctgcattattctcgggtatgggggctgtccgacattccccatcagaaggaaaaagatccctgaaaagtagcaggtgcttacatttctggcctctacccaccggctgcagtagtcccccaccaccctgcaatgtgacaaccaaaaatgtctctagatgttgccagaagtcctctagagatgggagggtacgactgccaccccgctgagaattcctgctgtcactggagtgggggctgttttctctcccatgcctctggtaccttgggggtcccccctgctcccaagggctgcttccaccaccctgtccatccatcccgattggctcccaggaggttttagctccgggcttcctgtctcccacaccactcctcacagttctccatgatttcaacatccaggtgggcgacgcagcctctcggttccttgaccctctgggtgatcctgctgcttctaccgggccaaccagtactcctaggagccctcacaatttgaccctcaggcatcccattgtctgcctggtgccacctttctttggctctgtccccaacggggtcttcactccattaatgccatcagcctctgacccagctccaaaccagctgtctagtaacccccgtcgcgcatcctcaacatccggttccccctcttgcattgctgcaatcatttggtgaaagcacaacccaaatgaaactcaagcttggctgggcacgggactcacacctataatcccagcactttgggaggccaaggcaggtgaatcgctttgagctcaggagttcaagagcagcaagaccccatctctacaacaaacaaacaaaaatcagccaggtgggatggcgcaaacctaaaatcccagctactcaggaggctgaggtgggacgatcagtggagccccagaggtcaaggctgcagtgagccatgatctagccaatgcacttaccctggatggacagagtgagaccctgtctcaaaaaacccaaaacccactctccaccttttcccacagagcaggccttgctcaggggtcctcccacacccctccctcatcttctcactctctgctgcttttcactttttctttgaacttatgatcgctcctccccattctctctcagctggggaccttacttcctacttaactcaaaagcagaaatgatcatgaaacgtgcacaagctcccactgcctcatcatcctacctccgtgcacctctgtacacttctattttttttccatttctatgctgaaccctctggcaccaaccgaggccaacacctccattggacccgaccctcttgttcactcaagcacatagctccaaaaatccttattttgcaaggttttctctttcatttgctccatcagcaaatggaataacctcttagccccatgtctaccttgctacccttactacaaaactggatgtgaatgccgaaaccctgtctctaccaaaaaatataaaaattagccaggtgtggtggtgcatgcctatagttccagctactcaggaggctgaggcacaagaatggcttaaaaccgggagagagaggttgcagtccagcctgggtgacagagtgagactcggtctcaaaaaaaaaaaaactgtatgtgaagagttgctggttcccctcgcccccacccatcactctcccagaagcctcccatgggtgacactaatggccagaggtcccctgacagggcagcagcacgtgacgcagtccatcatgcctctggcctaattcacttgcttccctggacttccccgacaccatccacacctgcttgtcccccgacctgtggggttgtccctcttcctctcctctgctgatccctcacctcgaaacctgcttgccactagaccgccccagggtatcaacttagttctcttttgggcagagtcttgctctgttgcccaggctggagtgcagtagcactatctcagctcactgcaacctctgcctcccagttcaagctatttttggcctatttttatatttttagtagagatggggttgcaccatgttgcccaggctggtcttgaactcctgatcttgtgatccacccgcctcagcctccccacgtgctgggattacaggcatggaccactgcacggccttagttgttttcatctctccccagcgctaggtgagaggtctcaactaatcttggcgctttagaattccatgtatatctaatgactcctcagttcatctctgagaagccctagcttcttcctagaacctcagaccaccctcccgttcccacatggatgtctaataggcagctcacaccaaacatgctgcaccccaagtcctgactgaaactcttcacccccaaactggctcctctctccagctcagcagctaaaatgatgaagttgccaacaattcacatcacaaacctcgtggtccttcttaacgttttggtctcctttataccccacatcccatctatgggagaatctggtcaactttccctaaagaatcctgcccaggctgggtgcagtggctcaccccttaatcccagcactttgggaggccaacgcaggctgatcacctgaggtcaggagttcaaggccagcctgaccaacatggtgaaaccccgtctctactaaaaacacaaaaattagccgggtatggtggggcgtgcctgtaatcccagctactagggaggctgaggcaggagaatcgcttgaacctgggagacacaggttacagtgagctgagatcgcaccactgcacttcagcctgggtgacagaccaaaactcggtctcaaaaaaaaaatctccagtgtctaggacagcaccaggcagagtgaacctttatccctcgggtcctagatattttccccgcttcattctcataccaccacagccatgtgctgagcctcttactacctttaataccaatgacttgatcttttaacagttttaatcatacatgaatataacggcaaataaacatacctcctctatatttttaaaccagcatcacctctatcaactggttacgatgaaagtaatatgataaaaatagtatcaagttcaatatctagctattgtggccacaacttgatcaccaagacctgaagcctacttctccactaaaaagggagtgacaacagccattagcaccaaatagactctctctgacatcataattagacttgtttaaaaagagttggaaaggaaatgactttctcagggcccagttcagttagcggatggcatgcccggaagccatctgaaatcacctctagagtttggggaccactgcgtgagacagggaaaagtccaaacccctctgagaaggggaagagagcagctggcgcagggcaccaagccttcagggaaaagccccactcgctgcatggtgagcgcttgttggtcccccatggataggagagaaaccaggcctaggctcccaaagtacagcaggggcctggaagcatctcccagggttgaggggtcagtggaggagagctgttctcactgtgaagactcctggggcaaagcgcggtggctcacgcctgtaatcccagcactttgggaggctgaggtgggctgatcacctgaggtcaggagttcgagaccagcctggccaacatggtgaaacttcatctctactaaaaacacaaaaatcagctaggcgtggtggcagatgcctgtaatcccagctactcgtgaggctgagacaggacactcctttgcaacccaggaggaggagcctgcagtgagccaagatcaagcctctatactccagccttcagagcaagactctgtctccaaaaaaaaaacaaaaaacaaaaaccctcagatgtgctctgctggcaaccagtccccctgcctctcctgagtggctgggctgagcgatggggatacagccactctgactccctaccccactgctgtctctgcttccctttctcaggcccagtgatttcttttctttttattatttatttttagacggagtctagctctgttgccaggctggagtgcagtggcgcgatctcggctcactgcaacctttgcctcccaggttcaagcgattctcctgcctcagcctcccaagtagctgagattacaggtgcgtgccaccacacctggctaatttttgtatttttagtagtggcaaggtttcaccatactggctgggatggtctcgatctcctgacctcgtgatccacctgcctcggtctcccaaagtgctggggttacaggcgtgagccaccatgcccggccggcccagtgattctttagcacacactggacacctcctgtgggttctgccccagacacttgagccttcttgggcagccaagggcaaagtggaacaaaaagaccatttttgccagttccgacacgaatacacacataatgcaggtggaaggtctgtcctgccttctgcatcttttgggtgcacaaaaacataaaatcaggcactagagccctgagggaggttggtaagcatgcctggctcctcagccaagaaggaactgtagtgcgagtttcaccaagttctatcagccagacgcatctcgacacaagccctctctaaagccagacccacttacctaccactggctacactgccagttacctccggcaagagctgtacaaggcctccacctctcctctcttgctagaggcccgaaagctaatgaagagcaagtaatcataaaccaagggacaggcggctgcaggttccttgcctgggacttcttggcttctgttccaacactgatttctcaaactagcttgctcaaatgcttttacttccctgaaccagtatgcaatcatgggatttataggaggttcttaaaagtagctctaaaggacagacattttcctttccatttaaaaaactgagccgggtgcagtggctcacacctgtaatcccagctctttgggaggccgaggtgggtggatcacttgaggtcaggagttcgagaccagcatggccaacatggtgaaactccgtctctactaaaaatatgaaaattagccagccacggtggtgcatgcctgtaatcccagctactcgggaggctgaggcaggagaatcgcttgaacccgggaggtggaggttgcagtgagcagagatagatcatgccagtgcactccatcctgggtgacagagtatcaaaaaactgcttatcctttcatctaccagcctcaccaaatgctcttggcgtcaggtgattcactgcaacgttgacttaagggtgcttttaatgccaggtgcggtggttcatgcctgtaatcccaaatcccagcaccttgggaggccaaggcaggaagatcattgacatcaggagttggagacaagcctgaccaacatagtgcaaccccatctgtactaaaaatacaaaaattagccaagcacgtggggcctgcctgtaatcccagctactcgggaggctgagacaaggggatcacttgaatccaggacgtagaggttgcagtgagccaagatcgcacccctgcactccagcctgggtgacagagactatctcaaaataaaaaagagtgcctttaattattaaatcgaagcaaatgtctttaacaattaagaatatacttaaccgggctccttcttgtttgctgatggtaacctccggggattctctctctgtttcagagggccccccccacaggaaacttcgcagtgatgcaccaggtatcatgccttcagcttcgcagctgtgtgttgtctcagtatccatttcttttctgcccaatgcgcccctctgcccaccccaatttttaaacccttgcacatttccacgagattcttgcaaaatctggaggcttggatatctttgtgcaaagctttcattgaaaccaagatcaggatgacaaatagacctcatctcttgacccactgtccttcctgcctctgggcagcacatgtgacatgacacccaacagtgtgcgcccttatcactgcatcttgacgagatggcagaggctgtgtgtgtagcttggatttttcttcctttcataccaaaagccactcttacgtggttagggcactcagcagtgctgtcctcccttgtccagtgaagacactgcactgaatgaatatgacagttccactatctgggcacattcctggagaacgtacttggcttctagttggctggtctgggtcacaagtcagagatcacaaagttcacggtaactgcggcgcggcaaccagtcctcccatgattcagctttcacaggcttgtctgcgaaggaaatgagctcactgcgatgtctgacaaatgccgggggctgcacgtggcttgagtgatgtctagctacaaactgcattttcagcacacggggtggaagctgaccaccgcaaagccaagcacagtcctggcagagccttttctggaggcttcacgggcatgtacatgttcagggactggggagtggatacccaagactcaaggatgcacacagggcccttcccaagaaagcatgaagaggtctctgctgctctgggattttgcttttttttttttttttttttgagacggagtctcgctctggagtgcaatggcgcaatcttggctcaccgcaacctttgcctcctgggttcaagcgattctcctacctcagccttctgagtagctgggattacaggctcccgccacctcgcccagctaatttttgtatttttattagagacaggatatcaccatgttggccaggctggtctcaaactcctgacttcaggtgatccgcgcgccttggcctccccaaatgctgggattacaagcatgaccaacttttcacaggtgaagttaggccatgtggatctgacttcacctcatggagaggccaaaccaaccctcatttgtgtccatcttcatttttggagaatctcagctttgctgtcactaccaaaatacttaaagcgcagggtgaggtcttgttaagagccagttttgtgggggagcagatgagtttctaggacacttcaagcagctctcctaccagctgattgggatcataggataagccaaattccagggtgggctgaagtgcagaacccactggtcagtgggaaactgagtccttgcaaactagcaggtgcttacactcaagatgattcccgaggccttggataagctgagtccacgaatagaatccaaatgctaggccaggcacagtgggtcatgcctataatcccagcactttgggaggccgaggcgggcagataacttgaggtcaggaccagcctggccaacatggtaaaaccccgtctctcctaaaaatacaaaaattagccaggagtggtggcatgtctgtagtcccagttacttggaaggctgaggcaggagaatcgcttgaacctgggaggcagaggctgcagtgagccaagatcacgccactgcactccagcctgggcaacacagcgagactctatttcaaaaaaaaattccagattctccaggatcagaccctttaagaaaacctttaggggggtcccttagttcctgtaacaggtatagttggtgtcaaccttggtctaggatttgaaaccagttccaagaaaagcacttcagccaaaacagagtatcttgcaggctgacagccaagcaaggagcttcaacggcccagggcacaatgtatttcttaggtcaagggagcaaatttatccattaagcttttccagttagcaaatagactcttccaagagccaaaaagagagtgcctagagcactgatgtggaggttagggactacttcccagctcatcagatttttttttgtttttttttttggagacagtcttgctgtttcccaggctggagtgcagtggcacaacgttggctcactgcagccttcacctcctgggttcaagcaattctcctgcctcagcctcctgagtgactgggattccaggcgcctgccaccacgcacggctaatttagtatatttagtagagacggggtttcaccatattggccaggatggcctcgaacaactgacctcacgagtgatctgcccacctcggcctccccaagtgctgggattacaggcatgagtcgcagcaactggccaacccatcagggtttgaacctggagttaaaactgtgacgaagagagctgtgtggggagcgtacagggaacagtcaaactgctgctcctctgcgctgaatttgagcatccttctgagtcaagcgcttggaaaacagtgctaaaaaagaaaaagacttaagggtcacatctagagagagaaggatggagagttctctagtagggctgcaagtccagaagcttctctgtgaagctgggctaggagtgtttactttgaagtggctgcagctttaagtatttattcctgatcgctgcactgcgggaagtcccatcctttatagccaggtgggctttcccagccggggtctctcccatcctctgtcaacaaaagggtcatttgcgaattcctcttctcagtgatcatgaatctctgggccttgatttttttttttttttttttttgagacggagtctcaccctgtcgcctaggctggagtgcagtggccacatctcggctcactgcaagctccgcctcctgggttcatgtcattctcctgcctcagcctccctcccgagtagctgggactacaggcacccgccagcacgcccggctaattttttgtatttttagtagagacacggtttcaccatgttagccaggatggtctcgatctcctgacctcatgatccgcccgcctcagcctcccaaagtgctgagattacaggtgtgagccaccatgcccagccgagttgttccttttgactaaagaattggtcactgagttgtgttcatccttatggcttcttatccaacccttgcgtggggagcaaaagtctgctctcttctttgatgtcctaaaataagacctgtcttccgattcaggtcaaacagggccagatggccagagcccaacataattatttgttgcggttgctgaaaagagttaagtgtttcttctgaacggtgaaggctggcagcaggcagatctgatttttccttcttctgcccactctcttcctcctacccaaagtctcccctcacgtgaccagcccttcctgtgaagtcgaggtgataaactcaagagagaaccagcgcagagaggagatggcagcattaaggagagacaggggtgtcctactggctggagctaaaatccacctcagaggccaggtgcactggcacacacctgtaatcccaacactttgagaggctaagacaggtggatcgtttgaggccaggagttcaagaccagcctgggtcacatggcaaaatcccatctctgctaaaaatacaaaaattagccaggcgtggcagtgtgcacgtgcatgtagtcccagctactcaatactgaggctcaaggactgctggaactcaggaggcagaggttgcagtgagccaagatcatgccactgcactccagcctgggtgagagagactcttaaatttcttttttaaatccaccttgaaggccaggtgtggtggcccacgcctgtaatgccagcgctttgggaggccaaggtaggagaactgcttgagctcaggagttccagaccagcctgggcaacaatatcaagacctcatctcaatttaataaaataatccaccttggattaacacgtataatttccttttctaatattcactgggcacctgttttacgccatgtgcggtatgttccacgatcagcaaaacagatgcagcagtccctgcagtggggaaaactcagtccatgaacattcacaccagcagggggtgctgtctcgccttttaaccagggagcccctctgtgtccttctcaaggctgcccttgtccatttcaccttcttccaattcaaatcttgaaaactcacctctaaggcgaatgggggtgaggagatacagaagaaaaacagtatgttctctcttcaactctgccccatgggctatgaataaagtcagaagacaaaatcccctgcttggtttttggcgtttttttcctattctaaatcaaagaccacagcagaccagaatcctgtggcttctcaaatgaccaagcctgacatattgaaaagcagatcgtcttgctttgaaaaaccttctccacccacccccgcaaccaatttcagctgattaaattcaatcactcatgccttaagactggcaatgatttgttgacttcaacttgaatatctgcatcttatttgtgccgtgtgtgttttctgccataaaaaaaatttatattgcaataggactatagctacaagtttaaaatagatttataaaaaatctatcccaaccatgaagatttctttgctaaataatgtgttttcttacaacccacaggcgaggaaacgagacctctttcgttccttctagaaggtctggaggacgtagagttattgaaaatgcagatggttctgaggaggaaacggacactcgagacgcagacttcaatggaaccaaggccagtgaataagcaactttctacagttttgcaccacggcaagaaaaccaaaaaccaaaacaaacaaacaaaaaaaacccaacaacaacccagaacaaagcaaaacccagcagactgtacttagcattgtctaaatccattctcaaattccaaatatcacagacacccctcacacaaggaatataaaaaccaccaccctccagcctgggcaacgtagtaaaacctcatctatacaagaatttaaaaataagctgggcgtggtggtacacacctgtggtcccagctactagggaggctgagccaggaagaacgctccagcccaggacttcgaggctgcaatgagctataattgcatcattgcactccagcctgggcaacagagaccctgtctcaaccaccaccaccaccaccacccctactacccctgtattcaaggtaaaaattgaagtttgtatgatgtaagagatgagaaaaacccaacaggaaacacagacacatcctccagttctatcaatggattgtgcagacactgagtttttagaaaaacatatccacggtaaccggtccctggcaattctgtttacatgaaatggggagaaagtcaccgaaatgggtgccgccggcccccactcccaattcattccctaacctgcaaacctttccaacttctcacgtcaggcctttgagaattctttccccctctcctggtttccacacctcagacacgcacagttcaccaagtgccttctgtagtcacatgaattgaaaaggagacgctgctcccacggaggggagcaggaatgctgcactgtttacaccctgactgtgcttaaaaacactttcactaataaatggttataaatcacaatgtcgttggcttttctgttgagctgttttctatagaggaaaaggagttggggaaggctgggttttgcttcatcgtcccaaagattctctgaagtcagggttaacgtcatgaatgcagaaactgaggcctagagaggtgaaatcaattgcctacaaccccacagccagccagagagcagagcagagatgcaaagtgagactgtctaagggggttactgggccgctcagcagggagggcaggggagagaaataaggtgatgtgtggtctaagggccactgccccctgccctcgaacatgactgggaagaacatcttgactcatcaaaaccagtatcttaagaaaaatacaggatttccttgattttttgagttaaaacacaaggtcttgtccaatgagtcagcaaacactttccacaaaacgtcagatggtggctgggtacagtggctcacacctggaatcccagcactttgggaggctgagatgggaaaatcacttgaggccaggagttggaggccagcctagccgagagagacccccgtctctataaaaaaaaggtgttttttttttgttgttgttagtaagccaggcaggatagtgcacacctgtactcccaacctcttggaaggctaaggcaggaggatcatgtgagccaggagttccaggctgcagtgagctatgatcacgccactgcactgcagcctaggtaacagtaacaccttgtctctcacaccaccaccaccacccacccagccagatagtattttagcctttacaggctacatatggtcttgccgaatattcatcttctttaaaacaacccttaaaaacataataaatcattcttagagtaagggccataaaaacaagctgtaggccctgtccttctttcagcttgagtgttttagacagacatgcctgcaaaggctctgttcaacacaaacgatgccgtataccaccaactccatgggatcagacagatttgggagacaggaaacatggaaacaaaggactccatcttgtgaccagatgctaatatgccttgaatgacgcacaaacacatcccggatacatttctaaaaacctggcttgaatagaaattttcaaaaagattttttcatattttttaacttggttaaaaaaagtttttcaccactctgtgggaaaacattaaagtataaacatacaaagcctctttgaccagaagcccaacaagttcaacattcgtttctcttgattttattgatcttttaaaaaaataaaaggacatcttctgtggatacaggttaggatgtttctagggtaagaaacccaccatcgcagcgtaattctctgcggaatttcagtagcacttggaaagttctgttttcaacctgaaatttttgctgttcttccagaaaataacttagtaacaaaatgaaggccgtgaagctgcaggcacactccagaaattagtgtgttcttttaactcgtgtcccaaagagacagcagttcctaacatgcagtgatgagtggacacaccatggtgcgttggaaatcccacgttcacgtctttgacaaggaagcctcctacaatgatcttgtgctttaattttacttgatggtcaccctggttacttcattatgcctttgaatgaagtcctgttcttagtggctgcattaccaaggccatcttgccccaaagacccctcagggtcctgaggcagaattccccccaccccaccaggggactcaggaaaatgaatgatcgcagtttgccaaaagaggtcagatttcccactgacgctggttggtctggaaaattactctgaaaactcgaacgcacctctaggaatctcaatgagaagctaagaagcaggctacagtctcagaggtttatgacacctttttttttttttttggagacggagtctcactctgttgcccaggctggagtacagtagcgcgatcttggctcactgcaccctccacctcccgggtccaagcaactctcctgcctcaacatctggagtagctggaattataggcacgcaccactgcacccagctaattttttgtatttttagtagagatggggtttcaccatgttggccaggctggtcttgaactcctgacctcaggtaatccacccgcctcggccttccaaagtcttaggattaccggcctgagccaccgcgcccagcctattccagtttttaaaaaggcatgtgactgttaagttctctgttcttagacatgatttcagtacaccacaaagcactgggagattttgttctggaagacgattccacctggttgggagttggggggaagagcctctgagagaagctccatcccacatttacggagacttgggacattaaaaacacctgtcaagaccaatcaggggccaggcacggtggctcaggcctgtaattccagcactctgggaggctgaggcgggaggatcacttgaggccgggagttcaagaccagcatggccaacatggtgaaaccccgtttctcactaaaaatacaaaattagtgggtgtagtggcacactcctgtagtcccagctacttgggaagctgagataagagaatcgcttgaacctaggaggcggaggctgcggtgagccgaaattgcaccactacactccagcctggacaagacagggcaagagcatgactctgtctcaaaaaagaaaaaaaaaaaaaagaccaatcaggacctccgcttgggttagtgcaacacaatggggcatgggaacgatggctcatgcttgaaatcccagcattctgggaggccgagatgggaggatcacttgaggccaggagttcaagaccacactgggcaacatggcaaaaccccgtctctattaaaaatacaaaaaattcagccaggtgtggtggtgggtgcctgtaatcccagctacctggaagactcaggaacaagaaccgtttgaacccaggaggcggaggttgcagtgagctgagatcacgccaccacactccagcctgggtgacagagcaagactctatctcaaaaacaacacggtagcctcatcaccgacaacttagagcccttcccagagagccccttttgtccctctttgcaatgcacacggtggcaggtaaggatgaaaagacatttcccagggacaaaccccagagcacaggtgatggcctcggtcattggcttgggccgcaaagctaactaactatggtgactgctcttatttctcaaactaacttaaaacaaaaacctagtgtaaaaagacgacaaaaggtaacgacttccgcaccaacaccaagaccttcagcttccgtggttttcctaaagcaacatcttgactaccccctgggctgacggcagcggcgatgaagacatgtgtgaaggcggcttcccaaattccaggcgcttccccaaccttcagacagagcaaaccaaattaagctgacataacagctgtgacaaactggctagcaccggggcccagagagttataagggtgaacatcaagagtcaggagcagggtctcacagggtctcaattttctctcctgtgaaatgaagaagaggacactggctacctggctctcagattccaaggtcacacaaaacgcccagtctcagacccactagaaaaatccatctcttacctattgtttgtttgttttacagcctacgcaacatagtgagaccctgtctctatgaaaaatgcaaacaaaaattagctgggtgtggtggcctgcatgtgtagtcccagctacttggtaggctgaggtggaaggatcgctggagcccaggaggcggaggttgcagtgagccgagatcacaccaccgcagtctagcctgggtgacagagtgagaccctgtctccaaaaaaaaaaaaaggccaggcatgattgctaacgcttgtaacccccagcacttgggaggtcaaggtgggaagatcgcctggaaaattaatctgaaaactcacctctagaaatctcaatgagaagcagactacagtctcagaggtgtattctcaaactcaaagccaggaggtttgagaccagtctgggcaacatagcaagactgtttctataaaatataaaaaaaattagccaggggtggtggtgtgcacctgtagccccagctacttgggaggctgaggcaggaagatggcttgagcccaggaggacgaggctgcagtgagctatggtcgcaccactgcactccagcctgggtgacacagcaaaaccctgtctcgtagaaagaaaacaaacaaaaattaatttttttttttttcttgagaaagagtctcactctgttgcccagagtggagttcagtggtgcaatcttggctcactgcaacctccacttcctgggttcaagtgattcttgtgcctcagccacccaagcagctgggactacaggcatccgcgaccatgcccggctaattttcgtatttttagtatagatagggtttcaccatgttgcccagtttggtcttgtgaactcctggcctcaagtgatccacccacttctgcctcccaaagtgctgggattacaggtgtgagccacttcactgcacctggcctaaaaatccacgtgtaaaggtctcaaagttatgtgcatgccatggaaaatattcttaatttcctgtcacgtgtctgctacaaacccatcaaattcctacggcttggggcccagagagatggtagtcacacaccttgcagaattcctgaatctgaaagctgccccttttttttctgagacaaggtctcgcttcatcacccaggctggagtgcagtggctgggaacacggctcactgcggcctcaacctccagagctcaattgatccgctgccctcagcctcccaaagtgctgggattacaagtgtgagccactgagcctggccctgattttctttaggcaagaaaattaatgacactgttagagatcagatctgcactgtcccatcgggtggctggtttcaggaacatagtctgggctagaagttagtgccagtttctcaaaggttctacagatttaaaaagaaaaaaaagggctggttgcagtggctcacgcctgtaatcccagcactttgagagcccgaggtgggtggatcacaatgtcacgagatcaagaccatcctaacacagtgaaaccccgtctcgactaaaaatacaaaaaattagctgggcatggtggcacacgcctgtaatcccagctactcaggaggctgaggcaggagaattgcttggacttgggaggcagaggttgcagtgagctgagatcatgccactacactccagcctaggcgacagagcaagacgtctcaaaaaaaaaacaaaacaaaacaaaaaaaaaaacttcaggggaagcagagccatgactgatgctcaattccccaaataagggctttatttttatttaactaattaattaactttttgatatggagtcttgctctgtcacccaggctgctgtgcagaggcacaattttggctcactgcaatctctgcctccagggttcaagtgattctccttcctcagcctcctgagtagctgggactataggcacatgctaccatgcctggctcatttttctattttttttggtggagatggggttttaccaatgttgcccagactggttttgaactcctgacctcaagtgatccacctgccttggcctcccagactgctgggattacaggcgagcgtcaccacacctggcccaaataagggcttttatacaggacattctcacagtgtaaccgtgagtagcagctgtagaatcaaatgataaaaatgaccttcttggccaggcatggtagcccacacctgtcgtcgcagcactttgggaggatgaagggtgaggatcacttgaagctcagagtttgagaccaaactcggcaacatggcaaaacctgtctctagaaaaaatacaaaaaattagccgagcacggtgacacgcacctgtactcccagctactcgggggactgaggtgggaggatcgtttgagctgggaggcagagggtgagccatgatcctgccatcgtattctagcctaggtgacagagtgagaccctgtctcacaaaacaagaccctctctctagccctttgttcaagccacaagacaccacctaatgctgcctgcagggagcagaggagaggataaggtttgctgaaataatcctataatttaaaaagacacatggctgtgggctgggggtgagtgtctcttgcctggggcaggcgggttctccccgccagcgagaggtttattagaaggtactgaccccttatcacccaaaggcacgctggtgctgcttggccgtctctccccgccatctctgttcttgctgctccgcccagaggctgggccacctgttcggtttggggactgatcgtacacgaggttccggcaggaagcgagtttggactccagtgcctggacagaaatacacttttatctctcaagttataggcaaggactattctgtcttaccagagcctgtacagaagaacgaaccccagacagtggttctcaaactgttgtgcactggaattccaaggtgggaccccaagaggaatccaacgtatatgccagtctcagaaccaagcaccttaagtatttgggagctggctgggcacaatggctcacacctataatcccagcactctgggaggccaaggcaggaggatggcttgacatcaggagtttgagaccagcctgggccacaaagtaagatcccatctcagtttttttttttgttttgttttttacttttttagacgctgtgtcacccaggctggagtgcactggtgagatcacagctcactgcagcctcaacctcccaggctcaaccaatccctcccacctcagcctcctgagcagctggaattataggcatccgcaatcatgcccagttaataaaaaaaatttttaatgcaaaaaattttttttaattacgaaaaattttttaaaatgtttgggagctgcctggaaaaagatcacggctcactgcagcctcaaccaatccttccacctcagcctcctgaatagctaggactatgcacaatcatgcttggcttaaaaaaaaaaaaaaaattcttttttaattacaaaaaattttttaaaatgggagctttctggaaaaatcactaacctaccaattatccaactccgcttgtaggaagtaggaaatccacttctggaatccttcaccctttggtttaccttgttaaacctctgcagaatggcaagaagtttggtaaggacttggtctggctacaacagaccctgaggaaaccaaaaggacactgacagcaccccaggcttctctatactccaactaggctaaatactgaaatgcagacctgcttctagaatagcaaaccagacagccaaaaaccagaagtaaaaacaaaagaaatgagttgcaagcttctattaagttgtagctacaaatacactgtgtacagtgacaacttggtaggagttaaattatgtggccttctaggcatcatttttaaaaataaactacaaagaatacctatgtttttacttaagcacaaaaggatccctccctgtaattaacataaaagctgaaaggccaaattctttgccctaggctttcaagattttttttttttttttttttgagaccaagtctcactttgtcacccagcggtgcgatctcagctcactgcaacctccgcctcccggattcaaacaattttcctgcataagcctctcaagtagctgggatcgcaggtgcccaccaccattcctggctaatttttgtatttttagtagagatggggtttcaccatgttggccaggctggtcttgaattcctgacttcaggtgatccacccatctcggtctcccaaagtgtcaaaattcacttaaaccccaagaaacaaaccaaaaaaaaaaaaaaaaaaaaaaaaggtggcagtttttttctcttctgagacaacgtcgtgctgtcacccaggatggagtgcagtgttggaatctcagctcactcagcctcaacctcccaggctgaagcaatcctcccacctctcagcctcctgagtagctgggaccaccagtgtacaccatcaggcctggctaatttttgcattcttgtagaggccaagtcggggcagggggtttcaccatgttgcccgggctggtgtcagactcctgagctcaagtaatctcccaccttggcctcccaaagcactgggattacaggtatgagcacccggccaaaagagaaggcagtttccaagtgctccttaatttttcgagttaaggaaaaaacacacatatcaccctaatttcccaaatttcctagaggaaaaacggtaaaaggaaagagacatacatagggttcagagcagggcttcgagtcagagctctgagtgtctggcagtaactcccacaggaagctctaatgattcccagggatgctaaaggagcagccacacctaaaactcaccacactgctatgaaaggggctggacgcattggctcatgcctgtaatcccagaactttgggaggccaacctgggaggatcacttgaggccaggagtttaagaccagcctgggcaacacagcgatacccacattactacaaaaaaatgaaagtatcagccaggcatagtggcgcacacctgtggtccaagctcctcgggaagctaaggtgagaggatcgcttgaacccaggattttgaggctgcagtgagttgtgatcataccactacactccagcctgagcaacagagcaagaccctgtctctaaaaaaaaagaaaaaaagaagagagggaaggaactagatcaacccccttcacacatcctgaaagacaggcaggaaggcaccaaacgccaggaaagtgtggtcttaccccgactttccgcagtaggtctcccacaatgttgagggctgatatccgggccgcaggtgtgaggggggtccccccggtggagtcgtccaggcctgggtgtgcaaagggaagagcatgtaactcaccaacctatagtcatgtctgtgcgttaacatcgctagatccaaaaccacgggacaggagggacactgacgcctttcctcggatcccaaaagctaccctatttctttccgtagttaaccgcatcacacacccaaggcccgtatgacaaccaatttttcaagtccttgtgatgactgcaacaaatacttatttttacatgttagtcttgctctgtcacccggactggagtgcggtgatgtgatctcagctcactgcaacctccgcctcccaggttcaagcgattctcctgccttggcctcttgagtagctgggattatagccatgtgccaccacacccggctaatttttgtatttttagtagagacagagttccatcacgttgtccaggctggtctcgaactcttgacctcaaatgatctgcccgccttggcctccaaaagtgctgggattacgggcgtgagccaccatgcctggcctttaacaaattttttttttaatagagacagggtctcactatgttgcccaggctgatcatgaactcctagtttcaagcgatcctcccaccttggccgcccaaagggctggtatttacaggcatgagccaccgtgcccagccacattagtctttttaaacaaacccaaaacaaatccttttgaaattgtagaaaatccatatagttaattaacataatggcatctgtgatagatacaagaactatagacaggatgatccagctttacaagggtcccgctctgcagagcctctcttctccaagtggggtccatgcaccagcagcacatgagaactgttagaaatgcagaatctctcggccaggcacagtagctcacacctgtaatcccagtgctttcagaggccgaggcagttcgatcagttgaggtcaggagttcaagaccagcctggccaacatggcaaaatcttgtttctactaaaaatacaaaattagctgggcatggtaacaggtgcctgcctgtaatcccagctactcgggaggctgaggcatgagaatcgcttgaatccaggaggcagaggctgcagtgagccaagatcaatgccgctgcactccagcctggccgacagagcaagactttgtctcaaaaaaaaaaaaaaagagagaaagaaatttcaggccccacccaagacccacttgatctgaggtacattctaccaagatccccaggtaagctacatgcatattgaagtgtggaaacatagccaggcatggagttgcatgcctctagtcccagctactcaggaggctgaggcaggaggatcactggagcccaggagttggaggctgcagtgagctatgattgcaccactgcactccagcctgggccacagaccaagactgtgtctctaaaaacaacaatgaaataaagtatgcaaaatggctctagactggggctaggcacagtgactcatacatgtaataccaccactttcaggggctgaggcaggcagatcacctgaggtcagtagtttgagaccagcccggccaacatggtgaaaccccatctctactaaaaatacaagattagccaggcatggtggtgggcacctgtaattcaagcttactcaggaggctgaggcaggagaatcacttgaacctgggaggagggggttacagcgagccaatatcgcaccattgcactccagcctgggcaacagagcaaaactccatctcaacaaaactaaacagaagggctctgcaccggaattctagaagtctcactggtctcttcatgcccaggggacaagctaagggataaggtagtagatggtagggtaagccctggagcctgcctgcctgggtctgaatcccaaaccatctgccattcaattgcttcatgactctgcttaactcagagcctcactttcatcaaacggggacagcacctgcatcctgggcctgcggcgaaggctgcaggctggccagcacacactgagcactccttaactgtctgttattaatatctgctgtaaaaggcctgatcggaagctgtcagcagaggggctggggtgagaactgagattctttttttctgcccatgcagcacacgttacgctgagtctagctctcggtggatgtattactaaacccacagaacgctttttacttttttgtatttggtcagtgacatttcaaatttgggaggttttatattcaacaagaggatttttgaccaggcgcggtggctcacacctgtaatcccagcactttgggatcagccgaggtgggcggatcacttgagtccaggaatttgataccagcctgggcgacatggcaagactgtgtctccacctaaaatacaaaagttagccaggtgcctttagtcccagctactccggaggatgaggtgggagaatcacttgagcccacgatgaagaggttgcagtgagccaagatcacgtcactacactccagcctgggcaacagagtgagatcctgtctcaaaaaaaaaaacccaacaaaaaaaaagaggatttctggctttgaagaatggaaaaagctgcagatgaagggccaatcctcgtagctgcagagtggcagccacccgctctgggtggggtttccatttcatcagactccactactgcctcttacccagtcctcactgatctcaatgcccatccccaagaacatcccagtctactctctgctcaaagcctgagagcaaatcaggctctgagcctgatgcaaatcatcacacccccaggacccaccccagattcttacccagaaacactttgtgaaccgagaaaatcctgcaattcccactccccttaccacgtctgaagctcccaggtgtgtttaaacttgagctgggtcctcggtgagcaatgggcgtggacggcacggagcccgtggcctgcacagctgtgtctgtcctctcagcttccactgagctgggcatgggggtcctgggtttctcctgcttctgctgcacggccagttcctgccgcaaatctgtgccagaaaaaggattcaggaattcaagtcctcagccaggcgcagtggctcatgtttataatgccagcactttgggaggccaaggcaggtggatcgcctgaggtcaggagttcgagaccagcctgaccaacatggtgaaacctcatctctattgaaaatacaaaaattagcccagcatggtagtaggcacctgtaatctcagctactcaggaggatgaggcatgagaatcatttgaacctgggaggccagggtggcagtgagctgagattgctccagcgcactccagtctgggtgacaagagcaagactacgtctcaaaaaacaaaaagggaatttaagtccttgcttagggttggtggggtgcagggagagaggttcaacagtagataccagtcagaaaaaagacctactggggtgaaacactccaggtagaaaccccaaataaagggaaacccacaggaccttgcctagcagacttggaactctacaggatgtttctcttgactaacaaaatggtttcagatttttaaaaagctatgacagtgacacactaatgcttttattattgaaaaaacaattccaacatagcagtgtatttagaacactaaatgaaaatatgcccgggagcagtgactcatgcctgtaatcccagcactttgggaggctgaggtgtaagaatcacattaatccagtaagtcgaggctgcagtaagccatgatcataccacttcagcctgggcgagagtgagacctctggctcaaaaaaaaaaaaaaaaaaaaaaaaaaaagaaaaaaaaaaaaaaaggccagttgcactggctcaagcctataatcccagcactctgagaggtcgagatgggaggattgcttgaggtcaggaattttcaggccaacatggcaaaaccccgtctctattaaaaatacaaaaaattagccatgcgtggtggtgagcgcctgtagtcccagctgcttgggaggctgaggcaagacaatcgcttgagcctgggggacaagcagtgagtgcagtgagctgagatcacgccactgcactccagcctgtgtgacagagcaagactgtctcaaaaataaataaagtatgctttccagactatccccaaatgctcctcctcactcatcatcaccataacatgtgggagagcttttcaaccattgttctctgaatttttttttttttttttttttgagatggagtttcactctcttgcccgggcttaagtgcagtggcacagtctcggctcactgtaaatctgcctcccgggttcaagtgattctcctgcctcagcctcccaagtagctgggattacaggcacgcaccaccacacctggctaatttttgtatttttagtagacacagggtttcaccatgttgtccaggctggactctaactcctgacctcaggtgatccacccaccttggcctcccaaagtgctgggaatacaggcgtgagccactgcgcccagctgttctctccattttcaaacataaactttatacatatgtatgtatctactgagcataaaacaagaaaattttttattaagcattactggaaacatacaatatgttgtcctgtgtatgacttactctccccacttcagtggtatgtcttggcaatgatttttgttttagagacagggtctgactcagtcacccaggctggggtgcggtggcacaatcatagctcaatgtaaccttgaactcctgggctcaagtcatcctcccacttcagcctcctaagtagctggaactacagacatatgccaccaggcctaatttttacaattttcatttttgtagagatggggtatcactatgttgtccaggctcatcttgaactcctaggctcaagcaatcctcttgcgtccgtctctcaaagcactgagattacaggcatcagccactgtgcctagccttggcaatctttctaccacaacatttctatctactgttcattttaaccattaacatttcacaaaatacatctatgtacttcatttaaccacttcattactgatggacatctaggaacaactactttattaaacttaagaatttttactttttatcccccacctactggttacacattagaaagcaaatcgacgttataaataattaattgggccagcaacagtgacccacccctataatcccagcactttgggaggccgaggcaggcagatcgcctggggtcaggagttcaagaccagcctggccaacatggtgaaaccccatctctattaaaaatataaaaattagccaggcatggtggtgcacacctgcagtcccagctactcaggaggctgaagcaggggaatcgctgaacctgggaggcagaggttgcagtgagcagagatagcaccactgcactccagcctggacaacagagcaagacgccatctcaaaaaaaaaaaaaaaaaaaaaaaaaaaggtaaaaacaacttggacaatccactaatgaatgtcttttttttttttttttttttgagacaagagtctcactctgtcacccaggctggagtgcaatggtgtaattttggctcactacaacctccacctcccaggttcaagcaattctcgtgcctcagcctcctgagcagctgggattgcaggcacccaccaccataccctcatgttttctatttttagtagagatggggtttctctatgttgtccaggctggtctcaaactcctgagctcaggtgatccacctgcctcagcctcccaaagtgctgggattacaggtgtgaaccactgtgcctggccaaatgcctcattacagtttcaacattctacctctggaagtgccaactgaaaaagagcaaatgctgatgaggtttcaaagttttagccaaatatattggttgccatcaagtcacaaaaataataggctagctggcaattccaccagaaatttctccccacaacatctttgcttcttaagagacagggtctcactctgtcacccaggctggagtgcactggtgccatcatagctcactgcatactccacctcctgggctgaagcaatcatcccaccttggcttcctgagtagctgggactacaggcacatgccatcacacccagctaatctttaaatgtttttgtaaagatggagtcccactatgctgcccaggctggtctcaaactcctgggctcaagagatcctcggcctcccaaagtgctgggattacaggtgtgagccactgtgccagatctccccacaaaactctctgttcctactgagcatcagggtagtttgctgtgtttgtgaattacagaccaggaagcatctttctggaaataaattctgctgcccagaggcagaatcccaatacaaggacttcatctgtgaaccccaaagctatttctctaaatacccataaggggcccttacagggctggatgtctgactgttctcagctccagccagggcccaaggcaagagtctgcccagtgcagtccgacaccctctgattagacaacctgggtgcagagcagggtgtggggtccctgtaaagataatgctgggagagcttgtgggacaagatgttgctcaggtagggagaggggaccatgctggtgaagacaccaaggcctcctgacctctggcttcatccttcagtctctgaacagattccaggagattctctttttcatcaagttcactttccaggaaggcatttctttcgatggcctgattcaagcgctgctcaaagtcttcgagagacatgatcgtggcgctggcgaagagaaaagcagagttatccaagaggacaaaccgcagcatccctccagcaccgcggatccaggaggtgcgaagggtcagacacacctgggcacaagtcccagccccaaacttcctagatgccacagagtgggccaagtcccttaaccttctggggcatgggctctttacctgcagaatgggactcatcatagctcatggggtgcacgaggctgtcatgaggattaaataagatgctgcccacacagcactcagcaataagccaaagccctatcaggactgcatgtggcatttggtggtttgagaagaccactatgctccatcttctcttgcaagctcacaatgccaaccagcattaaaaataacctaatatgactgggcaaggtggctcatgcctgtaatcccagccctttgggaggccgaggcaggtggaagacctgagatcaggagttcaagaccagcctggcaagctt

SEQ ID NO: 647 - DNA, 7586 bp, Homo sapiens
gttctttgtgacacatcacacagaattggagtgctgtccttctggagagtggtggagaaccaagatacagttcagaaccaaaggaatagagaagggctttgatttctttttggctttagattggggatttgggaggcttagcaggaaagatgtccactgaaaatgtggaagggaagcccagtaaccttggggagagaggaagagcccggagctccactttcctcagggttgtccagccaatgtttaaccacagtattttcacttctgcagtctctcctgctgcagaacgcatccgattcatcttgggagaggaggatgacagcccagctccccctcagctcttcacggaactggatgagctgctggccgtggatgggcaggagatggagtggaaggaaacagccaggtggatcaagtttgaagaaaaagtggaacagggtggggaaagatggagcaagccccatgtggccacattgtcccttcatagtttatttgagctgaggacatgtatggagaaaggatccatcatgcttgatcgggaggcttcttctctcccacagttggtggagatgattgttgaccatcagattgagacaggcctattgaaacctgaacttaaggataaggtgacctatactttgctccggaagcaccggcatcaaaccaagaaatccaaccttcggtccctggctgacattgggaagacagtctccagtgcaagtaggatgtttaccaaccctgataatggtagcccagccatgacccataggaatctgacttcctccagtctgaatgacatttctgataaaccggagaaggaccagctgaagaataagttcatgaaaaaattgccacgtgatgcagaagcttccaacgtgcttgttggggaggttgactttttggatactcctttcattgcctttgttaggctacagcaggctgtcatgctgggtgccctgactgaagttcctgtgcccacaaggttcttgttcattctcttaggtcctaaggggaaagccaagtcctaccacgagattggcagagccattgccaccctgatgtctgatgaggtgttccatgacattgcttataaagcaaaagacaggcacgacctgattgctggtattgatgagttcctagatgaagtcatcgtccttccacctggggaatgggatccagcaattaggatagagcctcctaagagtcttccatcctctgacaaaagaaagaatatgtactcaggtggagagaatgttcagatgaatggggatacgccccatgatggaggtcacggaggaggaggacatggggattgtgaagaattgcagcgaactggacggttctgtggtggactaattaaagacataaagaggaaagcgccattttttgccagtgatttttatgatgctttaaatattcaagctctttcggcaattctcttcatttatctggcaactgtaactaatgctatcacttttggaggactgcttggggatgccactgacaacatgcagggcgtgttggagagtttcctgggcactgctgtctctggagccatcttttgcctttttgctggtcaaccactcactattctgagcagcaccggacctgtcctagtttttgagaggcttctatttaatttcagcaaggacaataattttgactatttggagtttcgcctttggattggcctgtggtccgccttcctatgtctcattttggtagccactgatgccagcttcttggttcaatacttcacacgtttcacggaggagggcttttcctctctgattagcttcatctttatctatgatgctttcaagaagatgatcaagcttgcagattactaccccatcaactccaacttcaaagtgggctacaacactctcttttcctgtacctgtgtgccacctgacccagctaatatctcaatatctaatgacaccacactggccccagagtatttgccaactatgtcttctactgacatgtaccataatactacctttgactgggcatttttgtcgaagaaggagtgttcaaaatacggaggaaaccttgtcgggaacaactgtaattttgttcctgatatcacactcatgtcttttatcctcttcttgggaacctacacctcttccatggctctgaaaaaattcaaaactagtccttattttccaaccacagcaagaaaactgatcagtgattttgccattatcttgtccattctcatcttttgtgtaatagatgccctagtaggcgtggacaccccaaaactaattgtgccaagtgagttcaagccaacaagtccaaaccgaggttggttcgttccaccgtttggagaaaacccctggtgggtgtgccttgctgctgctatcccggctttgttggtcactatactgattttcatggaccaacaaattacagctgtgattgtaaacaggaaagaacataaactcaagaaaggagcagggtatcacttggatctcttttgggtggccatcctcatggttatatgctccctcatggctcttccgtggtatgtagctgctacggtcatctccattgctcacatcgacagtttgaagatggagacagagacttctgcacctggagaacaaccaaagtttctaggagtgagggaacaaagagtcactggaacccttgtgtttattctgactggtctgtcagtctttatggctcccatcttgaagtttatacccatgcctgtactctatggtgtgttcctgtatatgggagtagcatcccttaatggtgtgcagttcatggatcgtctgaagctgcttctgatgcctctgaagcatcagcctgacttcatctacctgcgtcatgttcctctgcgcagagtccacctgttcactttcctgcaggtgttgtgtctggccctgctttggatcctcaagtcaacggtggctgctatcatttttccagtaatgatcttggcacttgtagctgtcagaaaaggcatggactacctcttctcccagcatgacctcagcttcctggatgatgtcattccagaaaaggacaagaaaaagaaggaggatgagaagaaaaagaaaaagaagaagggaagtctggacagtgacaatgatgattctgactgcccatactcagaaaaagttccaagtattaaaattccaatggacatcatggaacagcaacctttcctaagcgatagcaaaccttctgacagagaaagatcaccaacattccttgaacgccacacatcatgctgataaaattcctttccttcagtcactcggtatgccaagtcctcctagaactccagtaaaagttgcctcaaattagactagaacttgaacctgaagacaatgattatttctggaggagcaagggaacagaaactacattgtaacctgtttgtctttcttaaaactgacatttgttgttaatgtcatttgtttttgtttggctgtttgtttattttttaacttttatttcgtctcagtttttggtcacaggccaaataatacagcgctctctctgcttctctcttgcatagatacaatcaagacaatagtgcaccgttccttaaaaacagcatctgaggaatcccccttttgttcttaaactttcagatgtgtcctttgataaccaaattctgtcactcaagacacagacacccacagaccctgtcctttgcctctattaagcagaggatggaagtattaaggattttgtaacaccttttatgaaaatgttgaaggaacttaaaactttagctttggagctgtgcttactggcttgtctttgtctggtagaacaaaccttgacctccagacagagtcccttctcacttatagagctctccaggactggaaaaagtgctgctattttaacttgctcttgcttgtaaatcctaatcttagagttatcaaaagaagaaaaaactgaaggtactttactccctatagagaaaccattgccatcattgtagcaagtgctggaatgtcccttttttcctatgcaacttttttataaccctttaatgaacttatctgtggagtacattgaagaatatttttcttcctagattttgttgtttaaattatggggcctaacctgccacttattttttgtcaatttttaaaacttttttttaattactgtaaagaaaatgaattttttcctgcagcaggaaacatagttttcagtagttctacctcttatttgtagctgccaggctttctgtaaaaattgtattgtatataatgtgatttttacacatacatacacacacaaatacacaatctctagggtaagccagaaggcaagatcagattaaaaacaccatgtttctaagcatccatttttccctttctttaaaagaaacttaactgttctatgaaggagattgagggagaagagacaaactcctatgtcatgagaataaccgatgttctgataatagtagcatctaggtacagatgctggttgtattaccacgtcaatgtcctatgcagtattgttagacattttctcattttgaaatatttgtgtgtttgtgtatgtgctctgtgccatggctggtgtatatatgtgcaatgttagaaggcaaaagagtgatggtaggcagagggcaaagtcattgaatctcttatgccagttttcataaaacccaaaccacatatgaaaaaatccattaagggtccaagaagtctgtccatatgaaaatgagggtaaatatagtttatttcccaggtatcagtcattataattgatataatagctctaacatgcaatataaaattcataggagtattaatagcccatttacacatctataaaatgtaatgggattgcagagctgcagagtacagtgtaacagtactctcatgcaatttttttcaggatgcaaaggcaattattctttgtaagcgggacatttagatatatttgtgtacatattatatgtatgtatatttcaaagtaccacactgaaaattagacatttattaaccaaatttaacgtggtatttaaaggtaatatttttaatatgatacattacatattgtgaatgtatactaaaaaaacattttaaatgttaaaattataatttcagattcatataaccacaactgtgatatatcctaactataaccagttgttgaggggtatactagaagcagaatgaaaccacattttttggtttgataatatgcacttattgactcccactcattgttatgttaattaagttattattctgtctccttgtaattttgattacaaaaattttattatcctgagttagctgttacttttacagtacctgatactcctaaaacttttaacttatacaaattagtcaataatgaccccaattttttcattaaaataatagtggtgaattatatgttattgtgttaaaacctcacttgccaaattctggcttcacatttgtatttagggctatccttaaaatgatgagtctatattatctagctttctattaccctaatataaactggtataagaagactttccttttttctttatgcatggaagcatcaataaattgtttaaaaaccatgtatagtaaattcagcttaacccgtgatcttcttaagttaaaggtacttttgttttataaaagctctagataaaactttcttttctgatcatgaatcaagtatctgtggtttcatgcccctctctatacctttcaaagaactcctgaagcaacttaactcatcatttcagcctctgagtagaggtaaaacctatgtgtacttctgtttatgatccatattgatatttatgacatgaacacagaatagtaccttacatttgctaaacagacagttaatatcaaatcctttcaatattctgggaacccagggaagtttttaaaaatgtcattactttcaaaggaacagaagtagttaaccaaactaacaagcaaaacctgaggtttacctagtgacaccaaattatcggtattttaactgaatttacccattgactaagaatgaaccggatttggtggtggttttgtttctatgcaaactggacacaaattacaacagtaaatttttttataagtgcttctcccttctccatgatgtgacttccggagataaaggattcaaaagataaagacaaagtacgctcagagttgttaaccagaaagtcctggctgtggttgcagaaacactgttggaagaaaagagatgactaagtcaagtgtctgccttatcaaaagagcaaaaatgcctctggttttgtgtttgggagaaaaatatcttggacgcactgttttccttgataaaagtcatcttctctactgtgtgaaatgaatacttggaattctaattgttttgtgtgccaggggcagtaatgtccctgcctcttctcccaatcaaggttgaggagtggggctggggagaggacttaactgacttaagaagtaggaaaacaaaaacctctctcctcagccttccacctccaagagaggaggaaaaacagttgtctgctgtctgtaattcagtttgcgtgtattttatgctcatgcaccaacccatacagagtaaatcttttatcaactatatactggtgtttaatagagaatgattgtcttccgagttttttggttccttttttaactgtgttaaagtacttgaaatgtattgactgctgactatattttaaaaacaaaatgaaataatttgagttgtattacagaggttgacattgttcagggatgggacaaagccttcttcaatccttttcatactacttaatgattttggtgcaggaacctgagattttctgatttatatttcatgatatttcacatttgctcttcacagcatgagcatgaagcccagtggcaccaaatggctgggtacaatcaagtgatattttgtagcacctcactatctgaaaggccatgagttttcagatgatttcattgagcttcattgcagcctgaaattttaaaaaagttgtgtaatacgccaaccagtcaagttgtgttttggccagagatttagatatgtccaatttcctggctcatttcattgtgctctatgggtacgtataaaaagcaagaattctgtttcctaggcaaacattgcaactcagggctaaagtcatccagtgaaacttttagagccagaagtaactttgtcccagtcctacaatgtgaaaagagtgaatagttgcctctttttagccattttcatggctggtacatattcgtacgcattacttttcagaatcaatacgcactttcagatattcttatttttattctcttaagtctttattaactttggagagagaaatgatgcatctttttattttaaatgaagtagatcaacatggtggaacaaaatgataaagaacagaaaacatttcaatatattactaataactttttccaatataaatcctaaaattcctataacatagtattttacagttttatgaagctttctattgtgacttttatggaattaagagatgaagaagatgagatattttagcatttatatttttcaaaattatatgtatacttaaaaataaagtaactttatgc

SEQ ID NO: 648 - DNA, 307 bp, Homo sapiens
  misc_feature (1)...(307): n=a,t,g or c
gatcactgtggacagggtgcagctctaccagttcctgtttctnctgagccagaccctcttcagggaagggaccaattaattttaaaactcacttgaagcacagctggtcatggggcttggtataaagttcctatttccaccctgatacttccaattcctggaaccccagcccactccnccatccctcctccctatcaaactagtataatgattttgaatcggtacagtgtgtttaactgtaactaagttcgacagactattattatctttgtaataaattaacctagcaataaaaattattctgtnt

SEQ ID NO: 649 - DNA, 388 bp, Homo sapiens
gatctatttgtgatgactatatggcaactctttgctgtcctcattgtactctttgccaaatcaagagagatatcaacagaaggagagccatgcgtactttctaaaaactgatggtgaaaagctcttaccgaagcaacaaaattcagcagacacctcttcagcttgagttcttcaccatcttttgcaactgaaatatgatggatatgcttaagtacaactgatggcatgaaaaaaatcaaatttttgatttattataaatgaatgttgtccctgaacttagctaaatggtgcaacttagtttctccttgctttcatattatcgaatttcctggcttataaactttttaaattacatttgaaatataaaccaaatgaaatattttactgt

SEQ ID NO: 650 - DNA, 301 bp, Homo sapiens
tgacacatctgttcaataaataaagagcttaaatatacaaaacataagaaatctgggcaacaaaacttgtggtctttacttttgaatagctacccaagaaaaggttttaaaggtaaaagttatgagtaatgtcatcacaataagctcttgtttaacattcttttcttttatgtataattaggtttatgtttcatgtctttttaaaaccttataaaagatttamttatcacatctattcttcaatgtggaaatattaaatattgttggttgtaaaataatatttatgtactacttgtgtctg

SEQ ID NO: 651 - DNA, 1971 bp, Homo sapiens
gtgatggatctcatcccaaacttggccgtggaaacctggcttctcctggctgtcagcctgatactcctctatctatatggaacccgtacacatggactttttaagaagcttggaattccagggcccacacctctgccttttttgggaaatgctttgtccttccgtaagggctattggacgtttgacatggaatgttataaaaagtatagaaaagtctggggtatttatgactgtcaacagcctatgctggctatcacagatcccgacatgatcaaaacagtgctagtgaaagaatgttattctgtcttcacaaaccggaggcctttcgggccagtgggatttatgaaaaatgccatctctatagctgaggatgaagaatggaagagaatacgatcattgctgtctccaacattcaccagcggaaaactcaaggagatggtccctatcattgcccagtatggagatgtgttggtgagaaatctgaggcgggaagcagagacaggcaagcctgtcaccttgaaacacgtctttggggcctacagcatggatgtgatcactagcacatcatttggagtgagcatcgactctctcaacaatccacaagacccctttgtggaaaacaccaagaagcttttaagatttaatccattagatccattcgttctctcaataaaagtctttccattccttaccccaattcttgaagcattaaatatcactgtgtttccaagaaaagttataagttttctaacaaaatctgtaaaacagataaaagaaggtcgcctcaaagagacacaaaagcaccgagtggatttccttcagctgatgattgactctcagaattcaaaagactctgagacccacaaagctctgtctgatctggagctcatggcccaatcaattatctttatttttgctggctatgaaaccacgagcagtgttctctccttcattatatatgaactggccactcaccctgatgtccagcagaaagtgcagaaggaaattgatacagttttacccaataaggcaccacccacctatgatactgtgctacagttggagtatcttgacatggtggtgaatgaaacactcagattattcccagttgctatgagacttgagagggtctgcaaaaaagatgttgaaatcaatgggatgtttattcccaaaggggtggtggtgatgattccaagctatgttcttcatcatgacccaaagtactggacagagcctgagaagttcctccctgaaaggttcagtaaaaagaacaaggacaacatagatccttacatatacacaccctttggaagtggacccagaaactgcattggcatgaggtttgctctcgtgaacatgaaacttgctctagtcagagtccttcagaacttctccttcaaaccttgtaaagaaacacagatccccctgaaattacgctttggaggacttcttctaacagaaaaacccattgttctaaaggctgagtcaagggatgagaccgtaagtggagcctgatttccctaaggacttctggtttgctctttaagaaagctgtgccccagaacaccagagacctcaaattactttacaaatagaaccctgaaatgaagacgggcttcatccaatgtgctgcataaataatcagggattctgtacgtgcattgtgctctctcatggtctgtatagagtgttatacttggtaatatagaggagatgaccaaatcagtgctggggaagtagatttggcttctctgcttctcataggactatctccaccacccccagttagcaccattaactcctcctgagctctgataacataattaacatttctcaataatttcaaccacaatcattaataaaaataggaattattttgatggctctaacagtgacatttatatcatgtgttatatctgtagtattctatagtaagctttatattaagcaaatcaataaaaacctctttac

SEQ ID NO: 652 - DNA, 466 bp, Homo sapiens
cccctttttctgggataagtacatttttggaccaccttgcttattcccttggggactgatcatgattcaccacatttgttctttgcagattattgctcccccagagcggaagtactcagtctggatcgggggctctatcctggcctctctctccaccttccagcagatgtggatcagcaagcctgagtatgatgaggcagggccctccattgtccacaggaagtgcttctaaagtcagaacaggttctccaaggatcccctcgagactactctgttaccagtcatgaaacattaaaacctacaagccttacttctctgtgtggggctcttttttcctgggctatgtctcatacacagtgctaaggacttttcacacattacttttaatccatgcaatagtgctctaaggtaggtgctatcattatacccatattacagatgaggaaattgaggctcagagaagtca

SEQ ID NO: 653 - DNA, 1806 bp, Homo sapiens
agggaacatctcggggagcctggttggaagctgcaggcttagtctgtcggctgcgggtctctgactgccctgtggggagggtcttgccttaacatcccttgcatttggctgcaaagaaatctgcttggaagaaggggttacgctgtttggccgggcagaaactccgctgagcagaacttgccgccagaatgctcctcctgttgctgagtatcatcgtcctccacgtcgcggtgctggtgctgctgttcgtctccacgatcgtcagccaatggatcgtgggcaatggacacgcaactgatctctggcagaactgtagcacctcttcctcaggaaatgtccaccactgtttctcatcatcaccaaacgaatggctgcagtctgtccaggccaccatgatcctgtcgatcatcttcagcattctgtctctgttcctgttcttctgccaactcttcaccctcaccaaggggggcaggttttacatcactggaatcttccaaattcttgctggtctgtgcgtgatgagtgctgcggccatctacacggtgaggcacccggagtggcatctcaactcggattactcctacggtttcgcctacatcctggcctgggtggccttccccctggcccttctcagcggtgtcatctatgtgatcttgcggaaacgcgaatgaggcgcccagacggtctgtctgaggctctgagcgtacatagggaagggaggaagggaaaccagaaagcagacaaagaaaaaagagctagcccaaaatcccaaactcaaaccaaaccaaacagaaagcagtggaggtgggggttgctgttgattgaagatgtatataatatctccggtttataaaacctatttataacactttttacatatatgtacatagtattgtttgctttttatgttgaccatcagcctcgtgttgagccttaaagaagtagctaaggaactttacatggtaacagtataatccagctcagtatttttgttttgttttttgtttgtttgttttgttttacccagaaataagataactccatgtcgccccttccctttcatctgaaagaagatacctccctcccagtccacctcatttagaaaaccaaagtgtgggtagaaaccccaaatgtccaaaagcccttttctggtgggtgacccagtgcatccaacagaaacagccgctgcccgaacctgtgtgaagctttacgcgcacacggacaaaatgcccaaactggagcccttgcaaaaacacggcttgtggcattggcatacttgcccttacaggtggagtatcttcgtcacacatctaaatgagaaatcagtgacaacaagtctttgaaatggtgctatggatttaccattccttattatcactaatcatctaaacaactcactggaaatccaattaacaattttacaacataagatagaatggagacctgaataattctgtgtaatataaatggtttataactgcttttgtacctagctaggctgctattattactataatgagtaaatcataaagccttcatcactcccacattttccttacggtcggagcatcagaacaagcgtctagactccttgggaccgtgagttcctagagcttggctgggtctaggctgttctgtgcctccaaggactgtctggcaatgacttgtattggccaccaactgtagatgtatatatggtgcccttctgatgctaagactccagaccttttgtttttgctttgcattttctgattttataccaactgtgtggactaagatgcattaaaataaacatcagagtaactc

SEQ ID NO: 654 - DNA, 1584 bp, Homo sapiens
gcgtcccccacaccacagacccgcgccgccgacgacccagcagccgccatgcgtctgctccgaggtgtgtttgtagttgctgctaagcgaacgccctttggagcttacggaggccttctgaaagacttcactgctactgacttgtctgaatttgctgccaaggctgccttgtctgctggcaaagtctcacctgaaacagttgacagtgtgattatgggcaatgtcctgcagagttcttcagatgctatatatttggcaaggcatgttggtttgcgtgtgggaatcccaaaggagaccccagctctcacgattaataggctctgtggttctggttttcagtccattgtgaatggatgtcaggaaatttgtgttaaagaagctgaagttgttttatgtggaggaaccgaaagcatgagccaagctccctactgtgtcagaaatgtgcgttttggaaccaagcttggatcagatatcaagctggaagattctttatgggtatcattaacagatcagcatgtccagctccccatggcaatgactgcagagaatcttactgtaaaacacaaaataagcagagaagaatgtgacaaatatgccctgcagtcacagcagagatggaaagctgctaatgatgctggctactttaatgatgaaatggcaccaattgaagtgaagacaaagaaaggaaaacagacaatgcaggtagacgagcatgctcggccccaaaccaccctggaacagttacagaaacttcctccagtattcaagaaagatggaactgttactgcagggaatgcatcgggtgtagctgatggtgctggagctgttatcatagctagtgaagatgctgttaagaaacataacttcacaccactggcaagaattgtgggctactttgtatctggatgtgatccctctatcatgggtattggtcctgtccctgctatcagtggggcactgaagaaagcaggactgagtcttaaggacatggatttggtagaggtgaatgaagcttttgctccccagtacttggctgttgagaggagtttggatcttgacataagtaaaaccaatgtgaatggaggagccattgctttgggtcacccactgggaggatctggatcaagaattactgcacacctggttcacgaattaaggcgtcgaggtggaaaatatgccgttggatcagcttgcattggaggtggccaaggtattgctgtcatcattcagagcacagcctgaagagaccagtgagctcactgtgacccatccttactctacttggccaggccacagtaaaacaagtgaccttcagagcagctgccacaactggccatgccctgccattgaaacagtgattaagtttgatcaagccatggtgacacaaaaatgcattgatcatgaataggagcccatgctagaagtacattctctcagatttgaaccagtgaaatatgatgtatttctgagctaaaactcaactatagaagacattaaaagaaatcgtattcttgccaagtaaccaccacttctgccttagataatatgattataaggaaatcaaataaatgttgccttaacttc

SEQ ID NO: 655 - DNA, 1517 bp, Homo sapiens
aggagggaagagtgtgcagacggaacttcagccgctgcctctgttctcagcgtcagtgccgccactgcccccgccagagcccaccggccagcatgtcctctgctcacttcaaccgaggccctgcctacgggctgtcagccgaggttaagaacaagctggcccagaagtatgaccaccagcgggagcaggagctgagagagtggatcgagggggtgacaggccgtcgcatcggcaacaacttcatggacggcctcaaagatggcatcattctttgcgaattcatcaataagctgcagccaggctccgtgaagaagatcaatgagtcaacccaaaattggcaccagctggagaacatcggcaacttcatcaaggccatcaccaagtatggggtgaagccccacgacatttttgaggccaacgacctgtttgagaacaccaaccatacacaggtgcagtccaccctcctggctttggccagcatggcgaagacgaaaggaaacaaggtgaacgtgggagtgaagtacgcagagaagcaggagcggaaattcgagccggggaagctaagagaagggcggaacatcattgggctgcagatgggcaccaacaagtttgccagccagcagggcatgacggcctatggcacccggcgccacctctacgaccccaagctgggcacagaccagcctctggaccaggcgaccatcagcctgcagatgggcaccaacaaaggagccagccaggctggcatgactgcgccagggaccaagcggcagatcttcgagccggggctgggcatggagcactgcgacacgctcaatgtcagcctgcagatgggcagcaacaagggcgcctcgcagcggggcatgacggtgtatgggctgccacgccaggtctacgaccccaagtactgtctgactcccgagtacccagagctgggtgagcccgcccacaaccaccacgcacacaactactacaattccgcctagggccacaaggccttccctgttttccccccaagggaggctgctgctgctcttggctggacccagccagggcccaagccgacccccctctccctgcatggcatcctccagcccctgtagaactcaacctctacagggttagagtttggagagagcagactggcggggggcccattggggggaaggggaccctccgctctgtagtgctacagggtccaacatagagccgggtgtccccaacagcgcccaaaggacgcactgagcaacgctattccagctgtccccccactccctcacaagtgggtacccccaggaccagaagctcccccagcaaagcccccagagcccaggctcggcctgcccccaccccattcccgcagtgggagcaaactgcatgcccagagacccagcggacacacgcggtttggtttgcagcgactggcatactatgtggatgtgacagtggcgtttgtaatgagagcactttcttttttttctatttcactggagcacaataaatggctgtaaaatctc

SEQ ID NO: 656 - DNA, 4043 bp, Homo sapiens
cgaagcgggtcctgccccgctgtcagctgcggcccccggcgccgggcgggggtggccgcgaccattggcggagaggcgaaaggggcggggccgccgccagccgctgcgggcaaggctgaacaggcggaggtgggcagccggccagggaagcacggtccaggcggctacattcggcccggccatggcagcggcgcccctgaaagtgtgcatcgtgggctcggggaactggggttcagctgttgcaaaaataattggtaataacgtcaagaaacttcagaaatttgcctccacagtcaagatgtgggtctttgaagaaacagtgaatggcagaaaactgacagacatcataaataatgaccatgaaaatgtaaaatatcttcctggacacaagctgccagaaaatgtggttgccatgtcaaatcttagcgaggctgtgcaggatgcagacctgctggtgtttgtcattccccaccagttcattcacagaatctgtgatgagatcactgggagagtgcccaagaaagcgctgggaatcaccctcatcaagggcatagacgagggccccgaggggctgaaactcatttctgacatcatccgtgagaagatgggtattgacatcagtgtgctgatgggagccaacattgccaatgaggtggctgcagagaagttctgtgagaccaccatcggcagcaaagtaatggagaacggccttctcttcaaagaacttctgcagactccaaattttcgaattacggtggttgatgatgcagacactgttgaactctgtggtgcgcttaagaacatcgtagctgtgggagctgggttctgcgacggcctccgctgtggagacaacaccaaagcggccgtcatccgcctgggactcatggaaatgattgcttttgccaggatcttctgcaaaggccaagtgtctacagccaccttcctagagagctgcggggtggccgacctgatcaccacctgttacggagggcggaaccgcagggtggccgaggccttcgccagaactgggaagaccattgaagagttggagaaggagatgctgaatgggcaaaagctccaaggaccgcagacttctgctgaagtgtaccgcatcctcaaacagaagggactactggacaagtttccattgtttactgcagtgtatcagatctgctacgaaagcagaccagttcaagagatgttgtcttgtcttcagagccatccagagcatacataaagtgaatcatgcaacgtgttgggggaagttctgcctttctgatcaatcttttgggttcacgtggaaaccaggacttggcaacatgatgtttgactgtaatctcatcacggatatgtatgaatttttacaggttcgtttttgaattgtgagaggcagttcattagcaaagatgtactgggcagtaactaaacacacatgcaaacatgtgaatggtggtttattcctcattctgtggatgtttctatgagccaaaatttgatgtctttttttcaaaattgcttatgaaatttccacacaatcgtagcttataagattggaacgatctcagccaaatattttaggtgtaattcatatgtatttgagtggaggattttttttctcatttttctagtgttaaattttaaccagcattaacatggtagagtggaggagtgagtgtgttcaaagatcaacatatttaacttttaaacactatctcaaagccagcataattaactactttgattgtgggctgacctttgtttttttaacaatcaggcatttttaattagataatccactcatgtatttccccctcactgcagttgtctgcatttttagcctcttttctcttcgttagttgtcagaatatgcctttgtcaaggctcagaggtaacaagacagaaaattcatctgggattttcctgctgtggctggcacattcttctgattaacagacacttgtatgatgctttaggctagttagtgcattttttagcaaacatttatcttaaacatcacagatccactggggggtgcaaggggctactgttagtcctcttgttagatgcagtcactcctcctggtcacctagtgagcagggacagagccaggagtcaagtgcagtgccaaggtgcatgaccctctgagaagtcactgggctgatttgacctccgactcattggttgtgtaaatgccatgtgcagcctttcctgaggccataggagggcttcctgcagctgagatctatgcaggccatcctctcaacaggtgccactccaagggcggtcctcggtgcagcagcatcagcttcacttgtgggggggtgggggaaggggcggtctcagaaatgcaggttcccaggtcccaccctggacttctgaaggggtgtggcatctgtgtttctgatgcttactacaatatgtgaaccactactttagaaaatctgctttaacttggtattcctctaattgtgttccctaggaaatgactgtcccaagagccagtgattattccaggtgttccctggaaaggtcaagtgagtctgggaaacactatgtctgtacacctcttgaaggtgtcgaatgtatgtttatacatcagtggaacccatttttctagcctagcaagtcccaaacacattacactgaagagattttggtgaggaaacttgctggagttttcagggaacactgttctaggcttaggtgaccttaggatcactcaagtagacccttcactccctgcgagaaattaggatgaataactacctgtggcattgttggttctgaacttttacagttcaggcctgctgtgaatctttgatgaagctttaaggtgacactgttgtacaagatgtcagctttgctgaaacgcacattacctggaataagtgctttaattgtagaattagaatgggatttactgtactgttttaaatgagattggcttcagaatccattacagttaccttacatagcacttgatacgtgttaaatgaacatatgaatgtaatttatatattcctagaatttaagttactttgtgagatttgggcctgtccctcaatgccagtttaggatttctttttttctataccttgaaatgattataaaatagattttcatgggaattttaaaaactctatccaaaacatttttggagcattttaaagccccatacacagaagtatacgaaagcacacaaaacactccaagtttcagcagttttagcgccaccattaacccactttgcttgtctcatgaaaaatctttgttaaagtttgtacacaggtaacaaaaagttactttaaaagatatataaagggctgtaagctaattgtggtgtctagtaagtagcataatgagatgtgaggagttggaactttgcgtgttttgcgtattttcatctgcattcagcttcttactctgggtttgtactcgagtgttatttctttacaaatgcccttgtaattaccactctgaagtctgctgactgtgtctcttgaacatacttaggatattctgcacattatggaaaaaggtaaattttagaagtttctgctctactaactgtagatatttatgactctgcgagttatctatttttataaccacctgtggtccattgttcattttaattcacatttcttatgaagtatggtaacagggagggagacacctagattagcagctcaatttgtactacttcagccaatctgtgaatgtaaaaactacactgttgccttgctaggatccaccctcctataatatggaacaaatatctgaatgaaatccaccctaggagacggagtcaaactaaacttgtggtttttcatttaacttttgactacagcatggccccatggcatccacaccaagagggtgttgtgatgaggtgccggtgtgcaaagggaactttagtttttccactggttcttatctgctagccttttacatacatgtgtactatatttgtttatagactgtaggtggatatataatttaaaagcttgatttaataaacatttaaccccctaaacttgggg

SEQ ID NO: 657 - DNA, 382 bp, Homo sapiens
agtcactgtttatactttaaaggttatattttaagctatttgagattgcttttgggaagatcactagatttatggaggaattagtcacaaatgacttgtagaaaatactgtcatatagttcatttcatcattttctgttgcaggaagccactccaccacagaatgctaatatgccagtggtacccagtacctcttgtatataggttattgcaaatattgttctgaaatgcttaacttcagagttacattttttaaagtaaataattgttttaaatctattttgtaagatataaagtacaatagaatttctggggtacagattaaactatttgcactaacacacgtgacgggcatgatttaataaaataactttactctccct

SEQ ID NO: 658 - DNA, 352 bp, Homo sapiens
  misc_feature (1)...(352): n=a,t,g or c
attaaataaaagttttgcttttatttaaaataaaatkcatttatacagtccttbgaacccattggattatttgaacmacatactggtaatccaccctctcccctcgcacccctttytgggtctatgtgakctaggamatttctctgatctagnancawatatmagattgtacacagcgcaacagmtctagaacatggccagtccaggcattagagttaaggacattgtggcaaatcatgatcataatgaagtcattcttaatttagtagatattaamctgacgttaattatatctcttaaaggcatttaattaacggagagatttctacawttavgccatctbctagttgtg

SEQ ID NO: 659 - DNA, 327 bp, Homo sapiens
tsttaaatgtgattatacttctctttgactygtcagcttagctttagctgatacactctggtgcccaactattattgtatcagtgaacttccactttcttttccttttctctcaatttttgttgtatcattcctaccttgtgaggacatataatatttacattctgttgtcatcctcacatttcttagttccacagtttaaatgtatttgaaactcaaaacattcccattaatctcttggtcagctgaaattaatgatttaatagtttccttaaaaaagactcatggaacaatttccctaaatttttgccatgtcaaatatgtttat

SEQ ID NO: 660 - DNA, 224 bp, Homo sapiens
gactattactagtaagacatttattaatgatattattacaattgtttctaaaatccattattatttcagcagcgaagagataaataccagagtaacctcagtcagatggtaacagttaggtctaaagaaaattatatgaaatactgactgtaatactgctatagagtatacagtatgttaaaacatgatggagaggctgcacacattggtaacgttttatgtca

SEQ ID NO: 661 - DNA, 235 bp, Homo sapiens
aaggttttaaaagcagbatttattgattgaaaataaatgtgtagataggctctcagtatggaatccatgttattttttaatgmagtacatgaagactccttagatcttccaccatgtatctbsgtgtgtgcttataacamccaccatattcaaatggvggggaattttcaacattttactgaaaaaaaaatgagaaattctyccttcagcagctctgcatagtttgacaaacttt

SEQ ID NO: 662 - DNA, 16382 bp, Homo sapiens
ctgcagccatgggtgccctatggagctggtggatactctgggctggagcaaccctcctgtggggattgacccaggaggcttcagtggacctcaagaacactggcagagaggaattcctcacagccttcctgcagaactatcagctggcctacagcaaggcctacccccgcctccttatctccagtctgtcagagagccccgcttcagtctccatcctcagccaggcagacaacacctcaaagaaggtcacagtgaggcccggggagtcggtcatggtcaacatcagtgccaaggctgagatgataggcagcaagatcttccagcatgcggtggtgatccattctgactatgccatctctgtgcaggcactaaatgccaagcctgacacagcggagctgacactgctgcggcccatccaggccctaggcaccgagtattttgtgctcacaccccccggcacctcagccaggaatgtcaaggagtttgccgtggtggccggtgccgcaggtgcctcggtcagtgtcacgctgaaggggtcagtgacattcaatggcaagttctatccagcaggcgatgtcctaagagtgactctacagccctacaatgtggcccagctacagagctcagtggatctctcggggtcaaaggtcacagctagtagccccgtggctgtcctctctggccacagctgtgcgcagaaacatacgacctgcaaccatgtggttgagcagctgctacccacgtctgcctggggcacccactatgtagtacccacgctggcctcccaatctcgctatgatttggccttcgttgtggccagccaggccacaaagctgacctacaaccatgggggtatcactggctcccgtgggctccaggcaggtgatgtggtagagtttgaggtccggccatcctggccactctacctgtctgcaaatgtgggcatccaggtcctgttgtttggcacaggtgccataaggaatgaagtgacttatgacccctacctggtcctgatcccagatgtggcggcctactgcccagcctatgtggtcaagagtgtaccaggctgtgagggcgtggccctggtagtggcacagacgaaggctatcagcgggctgaccatagatgggcatgcagtgggggccaagctcacctgggaggctgtgccaggcagtgagttctcgtatgctgaagtggagctcggcacagctgacatgatccacacggccgaggccaccaccaacttgggactgctcaccttcgggctggccaaggctataggctacgcaacagctgctgattgcggccggactgtactgtccccagtggagccctcctgcgaaggcatgcagtgcgcagccgggcagcgctgccaggtggtaggcgggaaggccgggtgtgtggcggagtccaccgctgtctgccgcgcccagggcgacccccattacaccaccttcgacggccgtcgctacgacatgatgggcacctgttcgtacacgatggtggagctgtgcagcgaggacgacaccctgcccgccttcagcgtggaggccaagaacgagcaccggggcagccgccgcgtctcctacgtgggcctcgtcactgtgcgcgcctacagccactctgtgtcgctgacccgcggtgaagttggcttcgtcctggttgacaaccagcgctcgcgcctgccagtctccctgagtgagggtcgcctgcgtgtgtaccagagcggaccacgggccgtggtggagctggtctttgggctggtggtcacttatgactgggactgccagctggcactcagcctgcctgcacgcttccaagaccaggtgtgcgggctgtgtggcaactataatggtgacccagcagacgacttcctcacgcctgacggggctctggctcctgacgctgtggagttcgcaagtagctggaagctggatgatggggactacctgtgtgaggatggctgccagaacaactgtcccgcctgcaccccaggccaggcccaacactatgagggcgaccgactctgtggcatgctgaccaagctcgatggccccttcgctgtctgccatgacaccctggaccccaggcccttcctggagcagtgtgtatatgacctgtgtgtggtcggtggggagcggctcagcctgtgccgtggcctcagcgcctatgcccaggcctgtctggagcttggcatctcggttggggactggagatcaccagccaactgccccctgtcctgccctgccaacagccgctatgagctctgcggccctgcttgcccgacctcctgcaacggggctgcggcgccgtccaactgctccgggcgcccctgcgtggagggctgcgtgtgcctcccaggcttcgtggccagcggcggcgcctgcgtgccggcctcgtcgtgtggctgcaccttccagggtctccagctcgctccgggccaggaagtgtgggcggacgagttgtgccaaaggcgctgcacctgcaacggcgccacccatcaggtcacctgccgcgacaagcagagctgcccggcgggtgagcgctgcagcgtccagaacggcctcctgggctgctaccccgatcgcttcgggacctgccaggggtccggggacccacactatgtgagcttcgacggccggcgcttcgacttcatgggcacctgcacgtacctgctggtcggctcatgcggccagaacgcagcgctgcctgccttccgggtgctggtggaaaacgagcatcggggcagccagactgtgagctacacgcgcgccgtgcgggtggaggcccgcggggtgaaggtggccgtgcgccgggagtaccccgggcaagtgctggtggatgacgtccttcagtatctgcccttccaagcagcagatgggcaggtgcaggtgttccgacagggcagggatgccgtcgtgcgcacggactttggcctgactgtcacttatgactggaatgcacgagtgactgccaaggtgcccagcagctatgctgaggccctgtgtggactctgtgggaacttcaacggggacccagctgatgacctggctctgcggggtgggggtcaagctgccaatgcactggcctttgggaacagctggcaagaagagacgaggcccggctgtggagcaactgaaccgggtgactgtcccaagctggactccctggtggcccagcagctgcagagcaagaatgagtgtggaatccttgccgaccccaaggggcccttccgggagtgccatagcaagctggacccccagggtgccgtgcgcgactgtgtctatgaccgctgcctgctgccaggccagtctgggccactgtgtgacgcactggccacctatgctgctgcatgccaggctgctggagccacagtgcacccctggaggagtgaagaactttgcccactgagctgcccaccccacagccactatgaggcgtgttcctacggctgcccgctgtcctgtggagacctcccagtgcccgggggctgtggctcagaatgccatgagggctgcgtgtgcgatgagggctttgcgctcagtggtgagtcctgcctgcccctggcctcctgtggctgcgtacaccagggcacctaccacccaccaggccagaccttctaccctggccccggatgtgattccctttgccactgccaggagggcggcctggtgtcctgtgagtcctccagctgcggaccgcacgaggcctgccagccatccggtggcagcttgggctgtgtggccgtgggctctagcacctgccaggcgtcaggagacccccactacaccaccttcgatggccgccgcttcgacttcatgggcacctgcgtgtatgtgctggctcagacctgcggcacccggcctggcctgcatcggtttgccgtcctgcaggagaacgtggcctggggtaatgggcgagtcagtgtgaccagggtgatcacggtccaggtggcaaacttcaccctgcggctggagcagagacagtggaaggtcacggtgaacggtgtggacatgaagctgcccgtggtgctggccaacggccagatccgtgcctcccagcatggttcagatgttgtgattgagaccgacttcggcctgcgtgtggcctacgaccttgtgtactatgtgcgggtcaccgtccccggaaactactaccagcagatgtgtggcctgtgtgggaactacaacggcgaccccaaggatgacttccagaagcccaatggctcacaggcaggcaacgccaatgagttcggcaactcctgggaggaggtggtgcccgactctccctgcctgccgcccaccccttgcccgccggggagcgaggactgtatccccagccacaagtgtcctcccgagctggagaagaagtatcagaaggaggagttctgtgggctcctctccagccccacagggccactgtcctcctgccacaagctggtggatccccagggtcccttgaaagattgcatctttgatctctgcctgggtggtgggaacctgagcattctctgcagcaacatccatgcctacgtgagtgcttgccaggcggctggaggccacgtggagccctggaggactgaaactttctgtcccatggagtgccctccgaacagtcactacgagctctgtgcggacacctgctccctgggctgctcagctctcagtgcccctccacagtgccaggatgggtgtgctgagggctgccagtgtgactccggcttcctctacaatggccaagcctgcgtgcccatccagcaatgcggctgctaccacaatggtgtctactatgagccggagcagacagtcctcattgacaactgtcggcagcagtgcacgtgccatgcgggtaaaggcatggtgtgccaggaacacagctgcaagccggggcaggtgtgccagccctccggaggcatcctgagctgcgtcaccaaagacccgtgccacggcgtgacatgccggccacaggagacatgcaaggagcagggtggccagggcgtgtgcctgcccaactatgaggccacgtgctggctgtggggcgacccacactaccactccttcgatggccggaagtttgacttccagggcacctgtaactatgtgctggcaacaactggctgcccgggggtcagcacccagggcctgacacccttcaccgtcaccaccaagaaccagaaccggggcaaccctgctgtgtcctacgtgagagtcgtcaccgtggctgccctcggcaccaacatctccatccacaaggacgagatcggcaaagtccgggtgaacggtgtgctcacagccttgcctgtctctgtggccgacgggcggatttcagtgacccagggtgcatcgaaggcactgctggtggctgactttggactgcaagtcagctatgactggaactggcgggtagacgtgacgctgcccagcagctatcatggcgcagtgtgcgggctctgcggtaacatggaccgcaaccccaacaatgaccaggtcttccctaatggcacactggctccctccatacccatctggggcggcagctggcgagccccaggctgggacccactgtgttgggacgaatgtcgggggtcctgcccaacgtgccctgaggaccggttggagcagtacgagggccctggcttctgcggacccctggcccccggcacagggggccctttcaccacctgccatgctcatgtgccacctgagagcttcttcaagggctgtgttctggacgtctgcatgggtggtggggaccgtgacattctttgcaaggctctggcttcctatgtggccgcctgccaggctgctggggttgtcatcgaagactggcgggcacaggttggctgtgagatcacctgcccagaaaacagccactatgaggtctgtggcccaccctgcccggccagctgtccgtcccctgcaccccttacgacgccagccgtatgtgagggcccctgtgtggagggctgccagtgcgacgcgggtttcgtgttaagtgctgaccgctgtgttcccctcaacaacggctgcggctgctgggccaatggcacctaccacgaggcgggcagtgagttttgggctgatggcacctgctcccagtggtgtcgctgcgggcctgggggtggctcgctggtctgcacacctgccagctgtgggctgggtgaagtgtgtggcctcctgccatccggccagcacggctgccagcccgtcagcacagctgagtgccaggcgtggggtgacccccattacgtcactctggatgggcaccgattcaatttccaaggcacctgcgagtacctgctgagtgcaccctgccacggaccacccttgggggctgagaacttcactgtcactgtagccaatgagcaccggggcagccaggctgtcagctacacccgcagtgtcaccctgcaaatctacaaccacagcctgacactgagtgcccgctggccccggaagctacaggtggacggcgtgttcgtcactctgcccttccagctggactcgctcctgcacgcacacctgagcggcgccgacgtggtggtgaccacaacctcagggctctcgctggctttcgacggggacagcttcgtgcgcctgcgcgtgccggcggcgtacgcgggctctctctgtggcttatgcgggaactacaaccaggaccccgcagacgacctgaaggcggtgggcgggaagcccgccggatggcaggtgggcggcgcccagggctgcggggaatgtgtgtccaagccatgcccgtcgccgtgcaccccagagcagcaagagtccttcggcggcccggacgcctgcggcgtgatctccgccaccgacggcccgctggcgccctgccacggccttgtgccgcccgcgcagtacttccagggctgcttgctggacgcctgccaagttcagggccatcctggaggcctctgtcctgcagtggccacctacgtggcagcctgtcaggccgctggggcccagctccgcgagtggaggcggccggacttctgtcccttccagtgccctgcccacagccactacgagctctgcggtgactcctgtcctgggagctgcccgagcctgtcggcacccgagggctgtgagtcggcctgccgtgaaggctgtgtctgcgatgctggcttcgtgctcagtggtgacacgtgtgtacctgtgggccagtgtggctgcctccacgatgaccgctactacccactgggccagaccttctaccctggccctgggtgtgattccctttgccgctgccgggagggcggtgaggtgtcctgtgagccctccagctgcggcccgcatgagacctgccggccatccggtggcagcttgggctgcgtggccgtgggctctaccacctgccaggcgtcgggagatccccactacaccaccttcgatggccgccgcttcgacttcatgggcacctgcgtgtatgtgctggctcagacctgcggcacccggcctggcctacatcggtttgccgtcctgcaggagaacgtggcctggggtaatgggcgagtcagtgtgaccagggtgatcacggtccaggtggcaaacttcaccctgcggctggagcagagacagtggaaggtcacggtgaacggtgtggacatgaagctgcccgtggtgctggccaacggccagatccgtgcctcccagcatggttcagatgttgtgattgagaccgacttcggcctgcgtgtggcctacgaccttgtgtactatgtgcgggtcaccgtccctggaaactactaccagctgatgtgtggcctgtgtgggaactacaacggcgaccccaaggatgacttccagaagcccaatggctcgcaggcaggcaacgccaatgagttcggcaactcctgggaggaggtggtgcccgactctccctgcctgccgccgcccacctgcccgccggggagcgagggctgtatccccagcgaggagtgtcctcccgagctggagaagaagtatcagaaggaggagttctgtgggctcctctccagccccacagggccactgtcctcctgccacaagctggtggatccccagggtcccttgaaagattgcatctttgatctctgcctgggtggtgggaacctgagcattctctgcagcaacatccatgcctacgtgagtgcttgccaggcggctggaggccacgtggagccctggaggaatgaaactttctgtcccatggaatgccctcagaacagtcactacgagctctgtgcggacacctgctccctgggctgctcggctctcagtgcccctctgcagtgcccagatgggtgtgctgagggctgccagtgtgactccggcttcctctacaacggccaagcctgcgtgcccatccagcaatgtggctgctaccacaatggtgcctactatgagccggagcagacagtcctcattgacaactgtcggcagcagtgcacgtgccatgcgggtaaagtcgtggtgtgccaggaacacagctgcaagccggggcaggtgtgccagccctccggaggcatcctgagctgcgtcaccaaagacccgtgccacggcgtgacatgccggccacaggagacatgcaaggagcagggtggccagggtgtgtgcctgcccaactatgaggccacgtgctggctgtggggcgacccacactaccactccttcgatggccggaagtttgacttccagggcacctgtaactatgtgctggcaacaactggctgcccgggggtcagcacccagggcctgacacccttcaccgtcaccaccaagaaccagaaccggggcaaccctgctgtatcctacgtgagagtcgtcaccgtggctgccctcggcaccaacatctccatccacaaggacgagatcggcaaagtccgggtgaacggtgtgctcacagccttgcctgtctccgtggccgacgggcggatttcagtggcccagggtgcatcgaaggcactgctggtggctgactttggactgcaagtcagctatgactggaactggcgggtagacgtgacgctccccagcagctatcatggcgcagtgtgcgggctctgcggtaacatggaccgcaaccccaacaatgaccaggtcttccctaatggcacactggctccctccatacccatctggggcggcagctggcgagccccaggctgggacccactgtgttgggacgaatgtcgggggtcctgcccaacgtgccctgaggaccggttggagcagtacgagggccctggcttctgcggacccctggcccccggcacagggggccctttcaccacctgccatgctcatgtgccacctgagagcttcttcaagggctgtgttctggacgtctgcatgggtggtggggaccatgacattctttgcaaggctctggcttcctacgtggccgcctgccaggccgctggggttgtcatcgaagactggcgggcacaggttggctgtgagatcacctgcccagaaaacagccactatgaggtctgtggcccaccctgcccggccagctgtccgtcccctgcaccccttacgacgccagccgtatgtgagggcccctgtgtggagggctgccagtgcgacgcgggtttcgtgttaagtgctgaccgctgtgttcccctcaacaacggctgcggctgctgggccaatggcacctaccacgaggcgggcagtgagttttgggctgatggcacctgctcccagtggtgtcgctgcgggcctgggggtggctcgctggtctgcacacctgccagctgtgggctgggtgaagtgtgtggcctcctgccatccggccagcacggctgccagcccgtcagcacagctgagtgccaggcgtggggtgacccccattacgtcactctggatgggcaccgattcgatttccaaggcacctgcgagtacctgctgagtgcaccctgccacggaccacccttgggggctgagaacttcactgtcactgtagccaatgagcaccggggcagccaggctgtcagctacacccgcagtgtcaccctgcaaatctacaaccacagcctgacactgagtgcccgctggccccggaagctacaggtggacggcgtgttcgtcactctgcccttccagctggactcgctcctgcacgcacacctgagcggcgccgacgtggtggtgaccacaacctcagggctctcgctggctttcgacggggacagcttcgtgcgcctgcgcgtgccggcggcgtacgcgggctctctctgtggcttatgcgggaactacaaccaggaccccgcagacgacctgaaggcggtgggcgggaagcccgccggatggcaggtgggcggcgcccagggctgcggggaatgtgtgtccaagccatgcccgtcgccgtgcaccccagagcagcaagagtccttcggcggcccggacgcctgcggcgtgatctccgccaccgacggcccgctggcgccctgccacggccttgtgccgcccgcgcagtacttccagggctgcttgctggacgcctgccaagttcagggccatcctggaggcctctgtcctgcagtggccacctacgtggcagcctgtcaggccgctggggcccagctccgcgagtggaggcggccggacttctgtcccttccagtgccctgcccacagccactacgagctctgcggtgactcctgtcctgggagctgcccgagcctgtcggcacccgagggctgtgagtcggcctgccgtgaaggctgtgtctgcgatgctggcttcgtgctcagtggtgacacgtgtgtacctgtgggccagtgtggctgcctccacgatgaccgctactacccactgggccagaccttctaccctggccctgggtgtgattccctttgccgctgccgggagggcggtgaggtgtcctgtgagccctccagctgcggcccgcatgagacctgccggccatccggtggcagcttgggctgcgtggccgtgggctctaccacctgccaggcgtcgggagatccccactacaccaccttcgatggccgccgcttcgacttcatgggcacctgcgtgtatgtgctggctcagacctgcggcacccggcctggcctacatcggtttgccgtcctgcaggagaacgtggcctggggtaatgggcgagtcagtgtgaccagggtgatcacggtccaggtggcaaacttcaccctgcggctggagcagagacagtggaaggtcacggtgaacggtgtggacatgaagctgcccgtggtgctggccaacggccagatccgtgcctcccagcatggttcagatgttgtgattgagaccgacttcggcctgcgtgtggcctacgaccttgtgtactatgtgcgggtcaccgtccctggaaactactaccagctgatgtgtggcctgtgtgggaactacaacggcgaccccaaggatgacttccagaagcccaatggctcgcaggcaggcaacgccaatgagttcggcaactcctgggaggaggtggtgcccgactctccctgcctgccgccgcccacctgcccgccggggagcgagggctgtatccccagcgaggagtgtcctcccgagctggagaagaagtatcagaaggaggagttctgtgggctcctctccagccccacagggccactgtcctcctgccacaagctggtggatccccagggtcccttgaaagattgcatctttgatctctgcctgggtggtgggaacctgagcattctctgcagcaacatccatgcctacgtgagtgcttgccaggcggctggaggccacgtggagccctggaggaatgaaactttctgtcccatggaatgccctcagaacagtcactacgagctctgtgcggacacctgctccctgggctgctcggctctcagtgcccctctgcagtgcccagatgggtgtgctgagggctgccagtgtgactccggcttcctctacaacggccaagcctgcgtgcccatccagcaatgtggctgctaccacaatggtgtctactatgagccggagcagacagtcctcattgacaactgtcggcagcagtgcacgtgccatgtgggtaaagtcgtggtgtgccaggaacacagctgcaagccggggcaggtgtgccagccctccggaggcatcctgagctgcgtcaacaaagacccgtgccacggcgtgacatgccggccacaggagacatgcaaggagcagggtggccagggtgtgtgcctgcccaactatgaggccacgtgctggctgtggggcgacccacactaccactccttcgatggccggaagtttgacttccagggcacctgtaactatgtgctggcaacaactggctgcccgggggtcagcacccagggcctgacacccttcaccgtcaccaccaagaaccagaaccggggcaaccctgctgtatcctacgtgagagtcgtcaccgtggctgccctcggcaccaacatctccatccacaaggacgagatcggcaaagtccgggtgaacggtgtgctcacagccttgcctgtctccgtggccgacgggcggatttcagtggcccagggtgcatcgaaggcactgctggtggctgactttggactgcaagtcagctatgactggaactggcgggtagacgtgacgctccccagcagctatcatggcgcagtgtgcgggctctgcggtaacatggaccgcaaccccaacaatgaccaggtcttccctaatggcacactggctccctccatacccatctggggcggcagctggcgagccccaggctgggacccactgtgttgggacgaatgtcgggggtcctgcccaacgtgccctgaggaccggttggagcagtacgaggggcctggcttctgcggacccctggcatctggcacagggggccccttcaccacctgccatgctcatgtgccacctgagagcttcttcaagggctgtgttctggacgtctgcatgggtggtggggaccatgacattctttgcaaggctctggcttcctacgtggccgcctgccaggccgctggggttgtcatcgaagactggcgggcacaggttggctgtgagatcacctgcccagaaaacagccactatgaggtctgtggcccaccctgcccggccagctgtccgtcccctgcaccccttacgacgccagccgtatgtgagggcccctgtgtggagggctgccagtgcgacgcgggtttcgtgttaagtgctgaccgctgtgttcccctcaacaacggctgcggctgctgggccaatggcacctaccacgaggcgggcagtgagttttgggctgatggcacctgctcccagtggtgtcgctgcgggcctgggggtggctcgctggtctgcacacctgccagctgtgggctgggtgaagtgtgtggcctcctgccatccggccagcacagctgccagcccgtcagcacagctgagtgccaggcgtggggtgacccccattacgtcactctggatgggcaccgattcgatttccaaggcacctgcgagtacctgctgagtgcaccctgccacggaccacccttgggggctgagaacttcactgtcactgtagccaatgagcaccggggcagccaggctgtcagctacacccgcagtgtcaccctgcaaatctacaaccacagcctgacactgagtgcccgctggccccggaagctacaggtcgacggcgtgttcgtggctctgcctttccagctggactcgctcctgcacgcacacctgagcggcgccgacgtggtggtgaccacaacctcagggctctcgctggctttcgatggggacagcttcgtgcgcctgcgcgtgccggcggcgtacgcggcctctctctgtggcttatgcgggaactacaaccaggaccccgcagacgacctgaaggctgtgggcgggaagcccgctggatggcaggtgggcggggcccagggctgcggggaatgtgtgtccaagccatgcccgtcgccgtgcaccccagagcagcaggagtccttcggcggcccggacgcctgcggcgtgatctccgccaccgacggcccgctggcaccctgccacggccttgtgccgcccgcgcagtacttccagggctgcttgctggacgcctgccaagttcagggccatcctggaggcctctgtcctgcagtggctacctacgtggcagcctgtcaggccgctggggcccagctcggcgagtggaggcggccggacttctgtcccttgcagtgccctgcccacagccactatgagctctgcggtgactcctgccctgtgagctgcccgagcctctcagcacccgagggctgtgagtcggcctgccgtgaaggctgtgtctgcgatgctggcttcgtactcagtggtgacacctgcgtacccgtgggccagtgtggctgcctccatgatggccgctactacccactgggcgaggtcttctacccgggccctgagtgtgagcgacgctgtgagtgtgggccaggtggccatgtcacctgccaggagggcgcagcctgtgggccccatgaggagtgccggttagaggatggtgtccaggcctgtcatgccacaggctgtggccgctgcctggccaacgggggcatccactacatcacccttgatggccgtgtctacgacctgcatggctcctgctcctatgtcttggcccaagtctgccacccaaagcctggggacgaggacttttccatcgtgcttgagaagaatgcagctggacatctccaacgcctcctggttactgtggctggccaggttgtgagcctagctcaggggcagcaggtcaccgtggacggcgaggctgtggccctgcctgtggctgtgggccgcgtgcgggtgaccgccgagggccgaaacatggttctgcagacgaccaaggggctgcggcttctctttgatggcgatgcccacctcctcatgtccatccccagccccttccgtggacggctctgtggcctctgtgggaacttcaatggcaactggagtgacgactttgtcctgcccaatggctcagcagcgtccagtgtggagaccttcggggctgcatggcgggtgcccggctcctccaagggctgtggcgagggctgcgggccccaaggctgcccagtgtgcttggcagaggagactgcaccctatgagagcaacgaggcctgcgggcagctccggaacccccagggccccttcgcgacctgccaggcggtgctgagtccctctgagtacttccgccaatgcgtatacgacctgtgcgcgcaaaagggtgacaaagccttcctgtgccgcagcctggcagcctacacggcggcctgtcaggcagctggcgtggccgtgaagccctggaggacagacagcttctgcccgctccattgccccgcccacagccactactccatctgcactcgcacctgccagggatcctgtgcggctctctccggcctcacgggctgcaccacccgctgttttgagggctgtgagtgcgacgaccgcttcctgctttcccagggtgtctgcatccctgtccaagattgtggctgcacccataatggccgatacttgccggtaaactcctccctgctgacctcagactgcagcgagcgctgttcctgttcctcaagctctggcctgacatgccaggccgctggctgcccaccaggccgtgtatgtgaggtcaaggctgaagcccggaactgctgggccacccgtggtctctgtgtcctgtctgtgggtgccaacctcaccacctttgatggggcccgtggtgccaccacctctcctggtgtctatgagctctcttcccgctgcccaggactacagaataccatcccctggtaccgtgtagttgccgaagtccagatctgccatggcaaaacggaggctgtgggccaggtccacatcttcttccaggatgggatggtgacgttgactccaaacaagggtgtgtgggtgaatggtctccgagtggatctcccagctgagaagttagcatctgtgtccgtgagtcgtacacctgatggctccctgctagtccgccagaaggcaggggtccaggtgtggcttggagccaatgggaaggtggctgtgattgtcagcaatgaccatgctgggaaactgtgtggggcctgtggaaactttgacggggaccagaccaatgattggcatgactcccaggagaagccagcgatggagaaatggagagcgcaggacttctccccatgttatggctgatcagtcatccaccaggaacgaagatttcctgaagaagacctggtccctctggaggttgcggtggctgaaggatgcatcatgtgctcctaccctgctctaccgcttttctgggtcacagaggccaaatgtgagagcattgaataaatatcttaagct

SEQ ID NO: 663 - DNA, 16382 bp, Homo sapiens; identical to SEQ ID NO: 662

SEQ ID NO: 664 - DNA, 1137 bp, Homo sapiens
gaattccgggcgcggcgtccggggcgagtgacacgcagagctgaagccatggttcatcaggtgctctaccgggcgctggtctccaccaagtggctggcggagtccatcaggactggcaagctggggcccggcctgcgggtgctggacgcgtcctggtactcaccaggcacccgagaggcccgcaaggagtacctcgagcgccacgtacccggcgcctctttctttgacatagaagagtgccgggacacggcgtcgccctacgagatgatgctgcccagcgaggctggcttcgccgagtatgtgggccgcctgggcatcagcaaccacacgcacgtggtggtgtatgatggtgaacacctgggcagcttctatgctccccgggtctggtggatgttccgtgtgtttggccaccgcaccgtatcagtgctcaatggtggcttccggaactggctgaaggagggccacccggtgacatccgagccctcacgcccagaaccggccgtcttcaaagccacactggaccgctccctgctcaagacctacgagcaggtgctggagaaccttgaatctaagaggttccagctggtggattcaaggtctcaagggcggttcctgggcaccgagccggagccggatgcagtaggactggactcgggccatatccgtggtgccgtcaacatgcctttcatggacttcctgactgaggatggcttcgagaagggcccagaagagctccgtgctctgttccagaccaagaaggtggatctctcgcagcctctcattgccacgtgccgcaagggagtcaccgcctgccacgtggccttggctgcctacctctgcggcaagcctgatgtggccgtgtacgatggctcctggtccgagtggtttcgccgggcccccccagagagccgtgtgtcccagggaaagtctgagaaggcctgagccgtgacctcttctgcttactgtaactgcggccggtttagtgaccccatgacttacagccggttcttacctcttaggtgaaggagatgacatgttttttagaattgctgtgcaaggctcaccctctctctgtcaacactggaataaactttgccttttctgaaaaaaaaaaaaaaaaaaaaaaaaccggaattc

SEQ ID NO: 665 - DNA, 2193 bp, Homo sapiens
cgatgatgattcagtggaatgggcccaagaccagcatttctgagaaggctcgggggctggctttgacctacagcctccgggacagggaacgtggtggtggtcgtgcacagattggtgtggtggatgatgaggccaaagccccggacctcatgcagatcatggaggctgtgctgggctgcagggtgggcagcctgcgtgccgccacgcccagcaaggatatcaaccagctgcagaaggccaatgttcgcctgtaccatgtctatgagaagggcaaagacctggtggtcctggagttggcgacccccccactgacccaggacctgctgcaggaggaggacttctacatcctggaccagggtggcttcaagatctatgtgtggcagggacgcatgtctagcctccaggagagaaaggctgccttcagccgggctgtgggcttcatccaggccaagggctacccgacctacaccaacgtggaggtggtgaacgacggcgccgagtcggccgcgttcaagcagctcttccggacttggtctgagaagcggcgcaggaaccagaagctcggcgggagggataaatcgattcatgtaaagctggacgtgggcaagctgcacacccagcctaagttagcggcccagctcaggatggtggacgacggctctgggaaggtggaggtgtggtgcatccaggacttacacaggcagcccgtggaccccaagcgtcatggacagctgtgtgcaggcaactgctaccttgtgctctacacataccagaggctgggccgtgttcagtacatcctgtacctatggcagggccaccaggccactgcggatgagattgaggccctgaacagcaacgctgaggaactagatgtcatgtatggtggcgtcctagtacaggagcatgtgaccatgggcagcgagcccccccacttcctcgccatcttccagggccagctggtgatcttccaggagagagctgggcaccatggaaaggggcagtcagcatccaccacaaggcttttccaagtgcaaggcactgacagccacaacaccaggaccatggaggtgccagcccgtgcctcatccctcaactccagtgacatcttcttgctggtcacagccagcgtctgctacctctggtttgggaagggctgtaatggtgatcagcgtgagatggcacgggtggtggtcactgtcatttccaggaagaatgaggaaacggtgctggagggtcaggagcctccccacttctgggaggccctgggaggccgggccccctaccccagcaacaagaggctccctgaggaggtccccagcttccagccacgactgtttgagtgctccagccacatgggctgcctggtcctcgcagaagtggggttcttcagccaggaggacctggacaagtatgacatcatgttactggacacctggcaggagatcttcctgtggcttggggaagctgcaagtgagtggaaggaggcggtggcctggggccaggagtacctgaagactcacccagcagggaggagcccggccacacccatcgtgctggtcaagcagggccatgagcctcccaccttcattggatggttcttcacttgggacccctacaagtggactagccacccgtcccacaaggaagtggtggatggcagcccggcagcagcatcaaccatctctgagataacagcagaagtcaacaacttgcggctatccagatggccgggcaatggcagggcaggtgccgtggccctgcaggccctcaagggctcccaggacagctcagagaatgatctggtgcgaagccccaagtcggctggcagcagaaccagcagctccgtcagcagcaccagcgccacgatcaacgggggcctgcgccgggaacaactgatgcaccaggctgttgaggacctgccagagggcgtggaccctgcccgcagggagttctatctctcagactctgacttccaagatatctttgggaaatccaaggaggaattctacagcatggccacgtggaggcagcggcaggagaaaaagcagctgggcttcttctgaacccaagccctctcgactgcccctatcccctggaccccaacatacctacaatgctggggaggccctgcttccactcccctcagaggcttttggtcatcctctgcgtgtcagtaaaagcaggcagcccata

SEQ ID NO: 666 - DNA, 298 bp, Homo sapiens
gggggtggcagtgcactttattaacaaacaaaacagtaccatacaggcaaaatcttacttcagtggcaaagcacacacataggtatactccaacgtgtagcactggggcaaacttcagacatggaacattaggcaccaagttcacaatcacactaaacatagttcacaatccttcaatccatactcttcagtggaggatgaggccttatttaacagttaactgggacagacagatgaagttttaaaatctaattcttggcctaactgtggagtggggctgactcagccttcagaactg

SEQ ID NO: 667 - DNA, 255 bp, Homo sapiens
  misc_feature (1)...(255): n=a,t,g or c
cagacaggctatcattctttattcttatccttttgttttaaagcatttttattagtctattttttncttaaatttttaaacagctatttttaaaaacacaacaaatacacaacacaaaacttggtaaaaataactcactatatggtacatatacgcagatggtgtaatatatttatataataaaagatgaaaatagtcactttccataataaaaataagtnctatttttngtttattttacaatatacttaatat

SEQ ID NO: 668 - DNA, 269 bp, Homo sapiens
tttttttttagaaaatgtcctaaaatgtgcattttattccatatcattatacaatgtttacatatagttaaaacttccttccaaaggaaaaccggtcctttacccaggttggtatggtgggtggtctaaatctttaacatgaagggactgaaaagagtggaaatccacactgattgttatcctacagattgtcatgagctgcacgtgtcgcaatcagaaggaatggaagtctcggaagagcagcgtgcttacagaccttggctttagtg

SEQ ID NO: 669 - DNA, 409 bp, Homo sapiens
  misc_feature (1)...(409): n=a,t,g or c
gaagaaactnnnntgtggatcctaaaattcatttggaaatgcaagagatgcagaagagtcaaaacagccttgaagcagaacaaagtaaaacttctcacaacaaagcagcactgatcaaggcactgtggcactggcataaggttaaacaggtcaatggantagagtcaagtgcccagaantaagcctgtacatttttggtcaactgattatcaataatggtgcgaagataattcaatggggaaaaataatgttttcaacaaatgggtgctggggacaactgggatatccacatgccaaaaggantgtgggggctctttacacccacacacaaaactttaatttcacattgggtccaaggtcttccacntaggngctggaattttttaaaatgccttttttnggggacccg

SEQ ID NO: 670 - DNA, 389 bp, Homo sapiens; identical to SEQ ID NO: 119
  misc_feature (1)...(389): n=a,t,g or c

SEQ ID NO: 671 - DNA, 382 bp, Homo sapiens
  misc_feature (1)...(382): n=a,t,g or c
ttttttttttttatatccatatctttatttaaacaagtttccataatagctaggagaatacagcattaatgacacacatttactaagcacaacaatggacaactacaaatttagagcataaatgtaattctgatattgttttggtttttatcttagcactaggtgatatctagtgaaaacccatgtttcaaaggcttttgttgatatgaggatgaattattaacttatttttaaaaattgcacgtgaggatatgctaggaatggggttctaggagtctaggagttaggttggataatggcctttcatgtctcagtatttctggcttccnttttaatgggggtaaatgtttcaccccaggggactttccaaaaaattggtatc

SEQ ID NO: 672 - DNA, 284 bp, Homo sapiens
ttttttttttttttttttttattgaatgcgtttattttaacaaccaaaaaattctaacagcctaacaatgcacataagttaaaaattaattatcacttagtgataacaaagatagttgatttacatggaaaaaagaacatttacaatatgttaatccttattcacattgttgataccgcaataaaacacaatttgtttttttcatttcacaaaaaaaaaaaaaagggcgggaaaattgtgctttgtcaaggggcactacaggggaaagtttcttcttccaaatg

SEQ ID NO: 673 - DNA, 438 bp, Homo sapiens
  misc_feature (1)...(438): n=a,t,g or c
tttttttttgactttaggcttctctatagcaatactttaatattccaaagaaaaatatgaactgagaattgtattatctagccaaattgtttttactgtgtaaaggctacagataaacatatttgacatggcaaaaatttagggaaattgttccatgagtcttttttaaggaaactattaaatcattaatttcagctgaccaagaggattaatgggaatgttttgagtttcaaatacatttaaactgtgggaactaaggaaatgtgaggatgacaacagaatgtaaatattatatgtcctcacaaggtagggantgatacaacaaaaattgaggggaaaagggaaaaggaaagtgggaagttcactggatacaataatagttggggcaccagagtgtatccggctaaagctaaggctggacagtccaaggggaggttt

SEQ ID NO: 674 - DNA, 503 bp, Homo sapiens
  misc_feature (1)...(503): n=a,t,g or c
tttttttttttttttttttttttggcaggccaaaaccctagtttatttcagcatcagcagttatcttagccatcaaaaaaataaactctaccaagggtnacggaagntctacagcaaggctaagggctcgccagacggnaancatcaggggtgcatggtgggcactgccagggcaataagttaggaagcagcagggctggntntcgggtttgggccgggcttcatttctgggcaggcatgaggtcgtcgatggcctggccctgctccagccgctgctccatctcgatgagcagcttcactccgtccaccaccatctgcaccagctccacctttgagaaagcccagggcgttcagcgtttgggagacgtncgaaagccccccggnccaccgcagtccgtnttccacaccgttntgtggcctncgtttttttgnaagttcgcagcctttttaaggcaccttccgagganttttttaatgttttgcccagggttggnaagtttttt

SEQ ID NO: 675 - DNA, 451 bp, Homo sapiens
  misc_feature (1)...(451): n=a,t,g or c
gaatttntttttattctttcagacctctcagggatgaacggacataggcttctaacacttaggtgtgggcaacattcttcgaagcacctccctcaaagtggaaaaggcctggggctcagacgagagaagagagaaggcagggagaaggtggaggtgaggaagggaggagggggctcagggggtgcaaatcgcagcggacctagaggtggcttggcaaatggaattcccaggaaggtttggaccccggcattggcgcccttcacatggacaagactccccagcacctgccccgtntgtgtggtccngatgggactggctgagtcctgggccctggccccggacaagaagcagcagaagcccacaggccaccacgtttcagccgggcancgaagtattgttgcagccgcttggtccgttccgttggttttcgtttcctttncccgacgacact

SEQ ID NO: 676 - DNA, 439 bp, Homo sapiens
  misc_feature (1)...(439): n=a,t,g or c
ncattannctttatntcctgtactgtgaagtgtgttgaaatgtggaagttatttcacaaagttaacagggtcttcaagacagaagagatatacgtgcagagtacacacatacacctacgtacacacctgtatatgtcgatgacgacagcatggagggaatgaacttgtgcatggagaagggggctttttttaaacttgaaagaaaccagcccattctgtgtgtgtttggaggaggggagcctgtaaagcctatttaccttgaatcccctctggcttacagctgcagagagcaaaggagagcagacatattctaggattggggcagtggggatgatgggtgattgcgttgctgctcaacgagtctggggtttgcagggtccaagggtaatgaccctttcccctgaggggccctcattcaaaggggctgagggttgcaagc

SEQ ID NO: 677 - DNA, 411 bp, Homo sapiens
  misc_feature (1)...(411): n=a,t,g or c
tatccttggatgtacaaaaaattcagaaaatgatctctgtagatattctgttttattttggtcatctttagaagttatcaggaatgtgtttaaaacaagaagagaacttttctaaggaatgatacatagaaaagattttattttaaaatgagttgtaaagcttgtgtttctttgttgctgcaagctatctgcccaagttaatgcaaatggacacattttttatgtcagaaaaacacacacacacacacacacacacacacacacacacgaaaaacaaaggaaaaaaatgcttgagctttttctaacttccccttgcagtctgttgtgtgagcagcctgtttatttcntctaatattatgtcagtttattctctttaatgggantgttaaaaaatgttattcacaggagtgc

SEQ ID NO: 678 - DNA, 420 bp, Homo sapiens
  misc_feature (1)...(420): n=a,t,g or c
ttgaccngatgagaaatcagcttgggtacagcccatgccngcagccctttcagtgggtggctccngatagtgttgtccnttcagttgctgggagcggtgaggcccagccctttccccttcctcccaccactattcctaacctggggcctggcaggggtggagtgatgtgatctaagggtcccngggngaagggtggagtggaagaggcagggtnttgggttaaagggaagattctgaggtctcagggcaaaggaaaaggtttttggatgaagactnaggcagtgctacctccctccacatntgaggntcaagcaggtttggncaagaacagagccctgcctggggctcttctnggccncagcctcaggagccaggggtttaaggccanagattaaattgaagttttnagcctttgataaa

SEQ ID NO: 679 - DNA, 415 bp, Homo sapiens
  misc_feature (1)...(415): n=a,t,g or c
ntggatgtacaaaaagaagatattttattgaggaagttgcaatgtttttacatacatgcacaatgcttacacaaattcagcttcgtgataatgcactttcatggagtcaaatttgcaaaaatgcataaaatganttagaactttctaaacatctttatacaatttataccttcagtattaaaaatggactgaggaggccgggcacagtggctcacacctgtaatccctgactttgagaggctgaagtggggcggatcacttgaggttaggagttggagacctgcctgggccaacatagtgaaaccctgtctgtaggtaaaantacaaaatttaacacttgagcccggggggcggnagggttgggagtgagctgaggattntacccactggcactccagcccggggttgacaaagt

SEQ ID NO: 680 - DNA, 254 bp, Homo sapiens
  misc_feature (1)...(254): n=a,t,g or c
tttaaggttacctgattcttttatttaagaaaagtgaaatacatggacctgaagtgagacagcagagggagggagtaagagcggccagggcaaggcagcttggctngccagcccccaaccctctgactgaaaagccagcagcaggctgcatctctgagggccatacctgctttgtacccaccttggggcctcagagctagctactctagaggaccacagggtgcagagagggtntcctgagggtccttcctaag

SEQ ID NO: 681 - DNA, 317 bp, Homo sapiens
  misc_feature (1)...(317): n=a,t,g or c
tcaagtctaagtgtttaattattattcacatatttcacagaaaaaaaggaatgtagcaaatgagtcggagttgtagaaaaaaaaaatcctggnttttacgtgtcattctgttttcatctgacagcagggctgtcccgacatcaggcacagcagctgcacttctctgacgcccctttgcagatgcagccctgggcacacttgggcacagcccaggggnaaacaggagcagcagcctgggggaaaaagggagagagaaggtcacaggcagacttnaccagggganctccctttcccaacagcaggcctgggctcaagct

SEQ ID NO: 682 - DNA, 340 bp, Homo sapiens
  misc_feature (1)...(340): n=a,t,g or c
ctagtacaaaaaaattaaatttgctttagttataaaagagctctgtcaatatacacaaactatatacttcagacattcacaaaaatgtgagcagaaggcttatcaaaagacatttaatacaattagttttcaacaaccccttggtggttccacatctacaaagatatccagcccaacccaaccccccttccaaatcccacccacacaggaaaaggcacatacttaccagaatttttaggcaggtatgggtttgggggaatttttgtggggttttgttttttttaaaaaaagggcccccgggggaaaggtttntttacggttttaatttgnccactgtcaa

SEQ ID NO: 683 - DNA, 309 bp, Homo sapiens
  misc_feature (1)...(309): n=a,t,g or c
cctctttctctctttttaattgctatatattagcttagaacaaggtacaaaatttggagattcacaggaacagcacagaagtttaacaatattaataaagttctaacacatgacaggaaagtttatctgggntcttgaaggcaacagctggntctgcatgcacattnctgggagtcnagtggattcnggaanaggtcttctctccatggctccatcttgctctttcacaaaggacccctaggtccatggcaccataagcccagggcnagtgatttgnagcatggagaagggaatngaagggncccgcta

SEQ ID NO: 684 - DNA, 351 bp, Homo sapiens
  misc_feature (1)...(351): n=a,t,g or c
tgttcctaacacaaatgtgaatttattggttgatttgatatttaaaatagtacttttacaaaatcatctcagaaaatatactacatttattaaaattcctacaaaccattgcagaaaatattaaaccctctaaccaacctaacactcgctttcagaggcacttgtgatgattttcacagcttccatagttgcaaagaacaaagaaatcatcttccaacaggggtggaattagataagaataatccaaaaaatatttatttctttacagactcacagattgcttgatgtttaggggctcttacctaggatacctaattattcaagggtttccnaatttagtagactttttca

SEQ ID NO: 685 - DNA, 383 bp, Homo sapiens
  misc_feature (1)...(383): n=a,t,g or c
cacaggaacaattcttttattgtacattggagaaatagccctgtgtgctggttcaaggtgcaacatacagaatattgaattaagaaaagagggaacggggaagggaanggaaacctctttgaggtccaaagttgncaacaaaaaatggtaaaagatttcctcacgcaaganggcatttttgcaaataccatgcaaaacaggcagctggtgtgccttaagagaatccctataaataacagaaaagacactccaagcattcctgtacgtggactcagagcacagagaaaagaaactaaaatgccttttggatttcaagatatttggcactcttgtgattacatttttttacagtccattaaaggggaataaactgacataatatt

SEQ ID NO: 686 - DNA, 1120 bp, Homo sapiens
acttcttcgcaccagggaagccccacccaccagaacgccaagatgtccagcaagcgggccaaagccaaggccaccaagaagcggccacagcgggccacatccaatgtcttcgcaatgtttgaccagtcccagatccaggagtttaaggaggctttcaacatgattgaccagaaccgtgatggcttcattgacaaggaggacctgcacgacatgctggcctcgctggggaagaaccccacagacgaatacctggagggcatgatgagcgaggccccggggccatacaacttcaccatgttcctcaccatgtttggggagaagctgaacggcacggaccccgaggatgtgattcgcaacgcctttgcctgcttcgacgaggaatcctcaggtttcatccatgaggaccacctccggaagctgctcaccaccatgggtgaccgcttcacagatgaggaagtggacgagatgtaccgggaggcacccgttgataagaaaggcaacttcaactacgtggagttcacccgcatcctcaaacatggcgccaaggataaacacgactaggccatccccagccccctgacacccagcccccgccagtcacccctccccgcacacacccgtccataccagctccctgcccatgaccctcgctcagggatccccctttgagggttagggtcccagttcccagtggaagaaacaggccaggagagtgcgtgccgagctgaggcagatgttcccacagtgaccccagagccctgggctatagtctctgacccctccaaggaaagaccaccttctggggacatgggctggagggcaggacctagaggcaccaagggaaccgcattccggggctgttccccgaggaggaagggaagcctctgtgtgccccccaggaggaagaggccctgagtcctgggatcagacaccccttcacgtgtatcccacacaaatgcaagctcaccaaggtcccctctcagtccccttccctacaccctgacgccagatgccgcacacccaacgccaccagccatgggagtgtgctcaggagtcgcggggcagacgtgacatctgtccagagggggcagaatctccaatagaggactgagacaacatg

SEQ ID NO: 687 - DNA, 1922 bp, Homo sapiens
gagacctgggcgttggtgaaggcgaggggaaagccagaatactggggtggcggacgccaaggggcgggtgtagcaggcaacctcagggaagctgggaaggcctagcagggtgagagaacccgcacacggggggcacagcgcctccctcgcgagccggtgcgaaaggggccgcctgcggtgtgcgcccagctgcgctcaagggaccttgcacttggcccatctcctgcgcacagcccaggccgggaccgcgggcggtgcggactcagcgggctgggtgcaagggcggggcggggcgtctgcgcccggccccgtctcctgactataaaagcagccgctggctgttgggctccactccgccttccacgtgcacccactgcctcttcccttctcgcttgggaactctagtctcgcctcgggttgcaatggaccccaactgctcctgtgccgctggtaagggacgcccgggttctgtgccttggaatgccaaattcccagacaccatagagagtgtccctgggtttgaggaggtcgtattttgctatcagaggtaaggggactcctttattggtccagtgctttcctgttggccaagctcctgagggcattttcctcctccctgttcctctatgtcagagttgagggtcctgaggctcaaggctgtcctgctcatgtcagagttgagggtcctgaggctcaaggctgtcctgcctcacgtcacctagttggtcacagggctgctggctgagccccaattctctaacctgactctgagctaccggattggataggagacattggataggagggacattgcctcttccaagttcaggacagaaagtcgaagtcttcctaggccgtgatctgcagggactttcctttggagtagaaataggagggtgcttggttttcccagcatgaatggagaggacatggggcttctcttcctcgtctctgagtgggaaaggagctctgacggctggctctggcacagagaagggggaagtggacactcattgacccactgctgtaccttctgcatctcactcaccgttcactggctttttctcttctagcaggtgtctcctgcacctgcgccagctcctgcaagtgcaaagagtgcaaatgcacctcctgcaagaagagtgagtgcggggccatctccaggaatctggggctgtggctaaggttgggagggaacccaaggctgtccctgagtgcctgcttctggggaaccggccttcctttgtccctgtaggttgtcacgcctgtctagtcttctgcactttccaaggcttatgtgaggtggggcagctttctcaaaggaagacccattccaatgtccaccagttgtctcctgacaaaaaccatgccatcatgaactaagggtcctctggggctggagggatggagacaggcctctgttggggcagggagttctatgatcgagtctgctctgacctctcaatctcctttcctccccaaggctgctgctcctgctgccctgtgggctgtgccaagtgtgcccaaggctgcatctgcaaaggggcatcggagaagtgcagctgctgcgcctgatgtcgggacagccctgctcccaagtacaaatagagtgacccgtaaaatctaggattttttgttttttgctacaatcttgacccctttgctacattcccttttttctgtgaaatatgtgaataataattaaacacttagacttgattcccgttctggttcctgttgtgtttttggaatgagggactggggtgggagattgaactgggagttcacactgggctctggacggaaatgtgagtgctaaacaagctgagcgccttcaggcagccccgttacttctctgacctccttcctctgtaaaaggcacctgcaccgtgccggatgatatggggatggggacatacgcg

SEQ ID NO: 688 - DNA, 2657 bp, Homo sapiens
tgggaacacaaacttgctggcgggaagagcccggaaagaaacctgtggatctcccttcgagatcatccaaagagaagaaaggtgacctcacattcgtgccccttagcagcactctgcagaaatgcctcctcagctgcaaaacggcctgaacctctcggccaaagttgtccagggaagcctggacagcctgccccaggcagtgagggagtttctcgagaataacgctgagctgtgtcagcctgatcacatccacatctgtgacggctctgaggaggagaatgggcggcttctgggccagatggaggaagagggcatcctcaggcggctgaagaagtatgacaactgctggttggctctcactgaccccagggatgtggccaggatcgaaagcaagacggttatcgtcacccaagagcaaagagacacagtgcccatccccaaaacaggcctcagccagctcggtcgctggatgtcagaggaggattttgagaaagcgttcaatgccaggttcccagggtgcatgaaaggtcgcaccatgtacgtcatcccattcagcatggggccgctgggctcacctctgtcgaagatcggcatcgagctgacggattcgccctacgtggtggccagcatgcggatcatgacgcggatgggcacgcccgtcctggaagcactgggcgatggggagtttgtcaaatgcctccattctgtggggtgccctctgcctttacaaaagcctttggtcaacaactggccctgcaacccggagctgacgctcatcgcccacctgcctgaccgcagagagatcatctcctttggcagtgggtacggcgggaactcgctgctcgggaagaagtgctttgctctcaggatggccagccggctggcagaggaggaagggtggctggcagagcacatgctgattctgggtataaccaaccctgagggtgagaagaagtacctggcggccgcatttcccagcgcctgcgggaagaccaacctggccatgatgaaccccagcctccccgggtggaaggttgagtgcgtcggggatgacattgcctggatgaagtttgacgcacaaggtcatttaagggccatcaacccagaaaatggctttttcggtgtcgctcctgggacttcagtgaagaccaaccccaatgccatcaagaccatccagaagaacacaatctttaccaatgtggccgagaccagcgacgggggcgtttactgggaaggcattgatgagccgctagcttcaggcgtcaccatcacgtcctggaagaataaggagtggagctcagaggatggggaaccttgtgcccaccccaactcgaggttctgcacccctgccagccagtgccccatcattgatgctgcctgggagtctccggaaggtgttcccattgaaggcattatctttggaggccgtagacctgctggtgtccctctagtctatgaagctctcagctggcaacatggagtctttgtgggggcggccatgagatcagaggccacagcggctgcagaacataaaggcaaaatcatcatgcatgacccctttgccatgcggcccttctttggctacaacttcggcaaatacctggcccactggcttagcatggcccagcacccagcagccaaactgcccaagatcttccatgtcaactggttccggaaggacaaggaaggcaaattcctctggccaggctttggagagaactccagggtgctggagtggatgttcaaccggatcgatggaaaagccagcaccaacgtcacgcccataggctacatccccaaggaggatgccctgaacctgaaaggcctggggcacatcaacatgatggagcttttcagcatctccaaggaattctgggacaaggaggtggaagacatcgagaagtatctggtggatcaagtcaatgccgacctcccctgtgaaatcgagagagagatccttgccttgaagcaaagaataagccagatgtaatcagggcctgagaataagccagatgtaatcagggcctgagtgctttacctttaaaatcattaaattaaaatccataaggtgcagtaggagcaagagagggcaagtgttcccaaattgacgccacctaataatcatcaccacaccgggagcagatctgaaggcacactttgatttttttaaggataagaaccacagaacactgggtagtagctaatgaaattgagaagggaaatcttagcatgcctccaaaaattcacatccaatgcatactttgttcaaatttaaggttactcaggcattgatcttttcagtgttttttcacttagctatgtggattagctagaatgcacaccaaaaagatacttgagctgtatatatatatgtgtgtgtgtgtgtgtgtgtgtgtgtgtgtgcatgtatgtgcacatgtgtctgtgtgatatttggtatgtgtatttgtatgtactgttattcaaaatatatttaatacctttggaaaatcttgggcaagatgacctactagttttccttgaaaaaaagttgctttgttattaatattgtgcttaaattatttttatacaccattgttccttacctttacataattgcaatatttcccccttactacttcttggaaaaaaattagaaaatgaagtttatagaaaag

SEQ ID NO: 689 - DNA, 2416 bp, Homo sapiens
agattatgatcgcctgaggcccctctcctacccagataccgatgttatactgatgtgtttttcctttttttttttttttttttaagtaattaagggtagttaaattatttaaagtatacaaagtccaaacagccaggggtaaggtctccaagaggccttcccagggtaagggagtgcggagaggccccggtcgccacccgcggtgcccatggagcgggtgaagatgatcaacgtgcagcgtctgctggaggctgccgagtttttggagcgccgggagcgagagtgtgaacatggctacgcctcttcattcccgtccatgccgagcccccgactgcagcattcaaagcccccacggaggttgagccgggcacagaaacacagcagcgggacgagcaacaccagcactgccaacagatctacacacaatgagctggaaaagaatcgacgagctcatctgcgcctttgtttagaacgcttaaaagttctgattccactaggaccagactgcacccggcacacaacacttggtttgctcaacaaagccaaagcacacatcaagaaacttgaagaagctgaaagaaaaagccagcaccagctcgagaatttggaacgagaacagagatttttaaagtggcgactggaacagctgcagggtcctcaggagatggaacgaatacgaatggacagcattggatcaactatttcttcagatcgttctgattcagagcgagaggagattgaagtggatgttgaaagcacagagttctcccatggagaagtggacaatataagtaccaccagcatcagtgacattgatgaccacagcagcctgccgagtattgggagtgacgagggttactccagtgccagtgtcaaactttcattcacttcatagaacccagcatgacataacagtgcagggcaaaatattcactgggccaattcaatacaaacaatctcttaaattgggttcatgatgcagtctcctctttaaaacaaaacaaaacaaaacaaaactatacttgaacaaaagggtcagaggacctgtatttaagcaaatacttagcaaaaagtggggcagagctcccaaggagaacaaatattcagaatattcatattggaaaaatcacaatttttaatggcagcagaaaacttgtgtgaaattttcttgatttgagttgattgagaagaggacattggagatgccatcctctttctcttttctcgtttgctcatactacattgagtagacacatttaaggatggggttatgaacccttcctgagctttatggtcctaaaagcaaaataaaaactattcgaatgaaaagacaagaaaatcaggtattaatcttggatagctaataatgagctattaaaactcagcctgggacagtttatcatgaagcctgtggatgatcaatcctttattattattttttttttttgaaaaaagctcatttcatgctctgcaaaaggagagactcccatgaagccttttgaaagggatcatcatgcagctcaactttctgttggattccatgctaagcaagctaaccttatcctgcattgttagcactaggcacccagctgccacctctccatcctgctgcccttaggccacatgggagcagtccatgcatgacagcctctatcctacaaggcctatgagtatggattgggggggccaaaaggaaaaagctccatgtgcctctttgtctgcgtgggtcagaagagttgtgcacgcagattagcaggccaaggtctgagccacagcagcatttttatttcagattttgataactgtttatatgtgttgaaaaccaaaatgacatctttttaaagcttatccataaaaaaaaatagatgtcttttatagtggaaaaacacatggggaaaaaaatcatctattttgatgcagcatttgataatgataaaacacctcacacctcactctttatagtgcacaaaatgaatgaggtctgggctaggtagaaaaagggtcaatgctatttttgtttttagaatcattaccttttaccagcttttaaccatctgatatctatagtagacacactatcatagttaacatagttaagttcagcacttgtctcattttaatgtaaagatttgcttccattttcctacaggcagtctctctcttcctcacagtcccactgtgcaggtgctattgttactcttacgaatattttcagtaatgttattttcttctaagtgaaatttctagcctgcactttgatgtcatgtgttccctttgtctttcaaactccaaggttcccctgtggccctctcccttaccctgggaaggcctcttggagaccttacccctggctgtttggactttgtatactttaaataatttaactacccttaattacttaaaaaaaaaaaaaaaa

SEQ ID NO: 690 - DNA, 4892 bp, Homo sapiens
ctgcagaaatgcctcctcagctgcaaaacggcctgaacctctcggccaaagttgtccagggaagcctggacagcctgccccaggcagtgagggagtttctcgagaataacgctgagctgtgtcagcctgatcacatccacatctgtgacggctctgaggaggagaatgggcggcttctgggccagatggaggaagagggcatcctcaggcggctgaagaagtatgacaactggtaagctcggcccccgctgcctgtcccagcaccctgcaggcagggctcccctgcgtctcctgggagttggtggagaaaggtgaatgaaggccttcgggtagtttcagactcttgagaagatgaatgcaatggtcagaaccatacagacttgaattttgtgacattagtgggccagcccaagctttaaatgaggtgtgtgcacaaaagctctgccaactagattcctgattaaaaaaaaggcagcccctctcctacagaccagctcctagtggagtaaatgtccacctggccatgtcttagacggtctgtgtgttcacagtgatggactgttgttagcgtgctcagcactctgctaggcatggaaagccacggtactgaaggagatggttcgctgcccgtggtgcttggctgaaaggaagcctgtgatttttgcagctggttggctctcactgaccccagggatgtggccaggatcgaaagcaagacggttatcgtcacccaagagcaaagagacacagtgcccatccccaaaacaggcctcagccagctcggtcgctggatgtcagaggaggattttgagaaagcgttcaatgccaggttcccagggtgcatgaaaggtgagcggaacattgatttgattgggtaaaacagcagagagccttttcttatttacatctatcctaatggtaattcaaacaataatggaagctccaccacctcagatgtctttcagttccatacatgaagttggcaatgtattgaaaatgcacatccctcttctgcttttacagactgtcttatacaaacgtgaaaactagttccatgcatatgggttttaaatagcttggtggacccaattgcacatttatgaaaactctttaatttcagcaggctgttcactttccagtggcctcttctaacccagggcctggtgaccagcagggtgtggtggtgttagtggaacaccgtgaaaatgggtctacctgggaaaaaaatgctggtcgtgttcgaagtccaaggtcatttctcaccagtgcccacccatcgcaccctgtaggtcgcaccatgtacgtcatcccattcagcatggggccgctgggctcacctctgtcgaagatcggcatcgagctgacggattcgccctacgtggtggccagcatgcggatcatgacgcggatgggcacgcccgtcctggaagcactgggcgatggggagtttgtcaaatgcctccattctgtggggtgccctctgcctttacaaagtaagtgtattatttcagaatcaaaagtcaaaataaaaaagaaagctgaacgcaaaccccagtgagtgcctcggggacccccaaccagggccctggcgcactgacttgggaggggtccttgttcacagagcctttggtcaacaactggccctgcaacccggagctgacgctcatcgcccacctgcctgaccgcagagagatcatctcctttggcagtgggtacggcgggaactcgctgctcgggaagaagtgctttgctctcaggaatgccagccggctggccaaggaggaagggtggctggcagagcacatgctggtgagctgcaggaagccctgatgtgcagatgagaggcctggggggtggcagaaacaaacagcattacagttcccacccgtcagcacacctctctgagcgtgcaggttcccggacagatcgggaaaccccaccagtaatgattagtttacacatatacatcgcttttgaagggcccccaaaacaccaggggaccatagagatccttttggacttcatgattcttgggagtgttgttgcactgatacctgaaggaatagatcttgagggcctacattccaacctctgggctgaagtaccaacctcggggagaaggaaacaaagatcacaataaagaatcttgtccccaacagattctgggtataaccaaccctgagggtgagaagaagtacctggcggccgcatttcccagcgcctgcgggaagtccaacctggccatgatgaaccccagcctccccgggtggaaggttgagtgcgtcggggatgacattgcctggatgaagtttgacgcacaaggtgactcttttagacccaactcttggtaacgattggactcaagcgaatcgttggccttcgaaacatgtcacattctcctcagtccagtgtttggatttttaaactctgttagtccagagttggccaagccttagaatatggatcctgtaagaattcttcaacttaatattcaatctggattgaaactgggccatatgttgctgtttgtttacatacatacatttgtttaaatggtattggtggaaaattgtggaggaagcaagagtcgtaaacgtatcaaagttgcatatgatgcttggatgaaaagagataaatgcatattctagggagggaaaaaagatttgagaagttggcatagaaattagtccggcaatatataagagtatatgttctgctttgcctggcactcactactgcttctctggtttaaaactctccaggtcatttaagggccatcaacccagaaaatggctttttcggtgtcgctcctgggacttcagtgaagaccaaccccaatgccatcaagaccatccagaagaacacaatctttaccaatgtggccgagaccagcgacgggggcgtttactgggaaggcattgatgagccgctagcttcaggcgtcaccatcacgtcctggaagaataaggagtggagctcagaggatggtgtgtccctgccagaggcctgtgtgtgccgggctgcagggactgcctgttttgagccaggcactcacgagcctttctctgtcttataggggaaccttgtgcccaccccaactcgaggttctgcacccctgccagccagtgccccatcattgatgctgcctgggagtctccggaaggtgttcccattgaaggcattatctttggaggccgtagacctgctggtgaggctctccttcatttaggctgggaacatgggtgtgctgggtaccgaaggcatctgtgaaatctctccttttccatgaccttgtcagagggtgcccaggggcttcctttcttgagcttccttcccaaagatccagaataattggcaagttcaaatgtagaaccaacccttctggtcacctggaacctttctgaatccttgatctattgtagcttgatcaaattttactttttactttgtggcctcagtcatgtaactttgagttagcagttttctgcaatttagcttggtgaatgcaaaactagctcgattacaagttattgtcttgccgtgtctttccgtgttgtgaataacaccactggttgtggagtctgaatttcaaagcctctgatgaacatttctctttttttttcctgctaaaggtgtccctctagtctatgaagctctcagctggcaacatggagtctttgtgggggcggccatgagatcagaggccacagcggctgcagaacataaaggtaaatcaaagtcctgatctgaaaccacagagaagtgggattagagcactcttcgtcactcttatgtctctctccttttctgtgtctgtgtgtggggagagagagagagagaaagagagagaggagaacaaagcatgctaatgtcaacaatcaatggcgtcagtcttgcctaggagagcctcatttactaatgaactccctctctgtttaacaggcaaaatcatcatgcatgacccctttgccatgcggcccttctttggctacaacttcggcaaatacctggcccactggcttagcatggcccagcacccagcagccaaactgcccaagatcttccatgtcaactggttccggaaggacaaggaaggcaaattcctctggccaggctttggagagaactccagggtgctggagtggatgttcaaccggatcgatggaaaagccagcaccaagctcacgcccataggctacatccccaaggaggatgccctgaacctgaaaggcctggggcacatcaacatgatggagcttttcagcatctccaaggaattctgggagaaggaggtggaagacatcgagaagtatctggaggatcaagtcaatgccgacctcccctgtgaaatcgagagagagatccttgccttgaagcaaagaataagccagatgtaatcagggcctgagtgctttacctttaaaatcattccctttcccatccataaggtgcagtaggagcaagagagggcaagtgttcccaaattgacgccaccataataatcatcaccacaccgtgagcagatctgaaaggcacactttgatttttttaaggataagaaccacagaacactgggtagtagctaatgaaattgagaaggaaatcttagcatgcctccaaaaattcacatccaatgcatagtttgttcaaatttaaggttactcaggcattgatcttttcagtgttttttcactttagctatgtggattagctagaatgcacaccaaaaaaatacttgagctgtatatatatatgtgtgtgtgtgtgtgtgtgtgtgtgtgtgtgcatgtatgtgcacatgtgtctgtgtggatatttgtgtatgtgtatttgtatgtactgttattgaaaatatatttaatacctttggaaaaatcttgggcaagatgacc

SEQ ID NO: 691 - DNA, 7345 bp, Homo sapiens
gatctggaagggtttatgaaaaaagcaaagaattatattaaacacaaaaacatcaagaataatctatatttaaaccagttgcttatgcaggtacatgtatattcactttcattaatatattgagatgattaaacttccttggcttggagatatctgaaaagtgtaattaattattattattattttaagagacagggtctcactctatcactcaggttggagtgcaatggcacaatcatagctcactgtaacttgaatgcttgaacctcgaacttctgagctcaagccttccacctgcctcagcctcccaaagtgctgggatttccagcatgaaccacaatacccagcctgaaaagtttaaatgttaatcagtttccttatttttcctacgtattatccagtgagcatttattaaatatctataatgagcttaatcttctacaaatttgtgtatcttgtgtatttgtgtacctacaaattgaaacatcttgatatttaatagtacctacatatttataacctaattacgtctgagttaatcctcgtacgattttttccatcttgaacagctatgatttgaacatttccttttgccacacatatgcaaatcagtaataaacttccgtacagtactttagagcttagaaaagacctttcatgtaagagtcacataatatcctatgaggctggcaagaaaatacatgttactcttattacagatgagaaactgggactcaaagaggtgtgaagctagtgtcccaacagttacttagcatttactgggtaagcccaggctctaactgggtctcctgacagaagtccagctctctctctctgctgcctctttgtcagaactcctggcctgccagcgaatttaactgtctatgagtaaattctaacatctaaggttctaagtataaaatatattgaggtttacagtggtgagaaaaagcaagtgtctgcgtattacagacagctgataaatacgtattgagtcatcagaaagtgaaaatagatgtaggactattatgcaaagcataggagaggaagagcatatgcttaagaaaaaatggcattcctagagttaacaagcatgtttcaaagtatctattactgaaatctacacgattttcctttccacaataaagtccacaactgttgtcttaaataataactgcaggttttgccctccaagtcaaacttggagctccaactactggcagctcaccgtaagaatatattaattatttccaatttccttttaagaagtcgaatacaaagtagagagaatatctgcagcttggttgcaaagccgcttaaacatttcactggctagttctggtaatattatccgaaatcaactcattttgtggttgaggtaatctatttgtctttaccaatcaagtcgttttaaaaccttcaggagtagagatgatacttgaagaattaacaaataaaacttaatcaaggaaactgttaactcattctcccccctactttttgccagttattaaatgttctggtaaatcctaactcaacaagaatgactcatgaggaaatcctgactccttgaactcactgattctggtgcattacagctatgaaatctctatgtctgcagctttctctcccaccataaggaaatctgtgatttctattttggcaggagatgtgaccaaggactcctgaggaatgaccctatagacagacccagccacgtgcctagtagtgatcaaaaatgcaaacccaattaaagcactgtcttctgataaagtcactttctcttgttcaatccctaatgttcattctcaaagtgttccaagacgccccagcaagctgcagagcagatcccaccctgcccctgggcaatcaacgtttcaggttactccttccttaagttaagtggcagagagaaacgggcgagggtctccccgttgcctcagttcacagaccagggggtgtcgaatgagtcctacagcaggacagcaaacaagaaatgaggcgcggggtcagggaacgcgctcaaaaaaggaagaaaaatcccactcttcattcgaaatcaggccactgcactccggcctcgtggcgggcgacctcctcctgccagggaatcgccgctctggcctcgggctggggagcccgtcagggtgggtgagggagcgccggcgcccccgcccggccgccgccaacttcggctccctccctccgtcgcaaagccctcgagcccgcccggccgccacgcttcagcaaaaggtcgtgcgcagcggcccacactgaagactctccatctgctcccacacctgccccagctggccgctgctatgtggcccgagtgcgcaagaagccggggccgcagacgtcagcagcgccccggcttcgagacccttcggcagcagccgtgactgccgccggcgggcgctgacccatccccgtgccagtctgcagccgaccaatccgcgtcctcttgaggcggggccggagccgcgaggccccgcccccaagccgaggcctcataaatgctgcgacgcacgcccagccgcaaacagccggggctccagcgggagaacgataatgcaaagtgctatgttcttggctgttcaacacgactgcagacccatggacaagagcgcaggcagtggccacaagagcgaggagaagcgagaaaagatgaaacggaccctgtgagtatggctttcttccctctcccgccaccccctgccccacactgcaagctgcaaacgcggtactttcgggctcgcctttgacgttaggaaactagcctgagcctatgcagggaaaaaaaatcgaaaaggtcaatttgttaagtaaggttaaatctgggtgatgctcgggtacagtttaagaaccgagggagacagttgatatgagggcggtggttgatgcgctaagaaattgcgggttggctttttgtcctcctgcattcaaaatgacatcagaatcctgcggctgaagcgcgtccccagcattcatacgttgcatgatgagttctcatcagcttacacagctactggaaggtgatgctcttgctggttctgaatatactcgtttaaaatccatttttgttttttaattatagagcagatctcacccagtccgaatgtggaacaaataattgttatgcagcgtctgcttaaaagaagtgtcgtaggtggggaaggaagagcgcaggggaatcagtcacccacctctttgtacagtctctggcgtggtccagaacctcctgctctaaagagagaagcgtgggccggctccagacagttccatgtctgtccttttcattaaagtgcaaaacgtctcggaattgtaattaaccttgcaaacaaactgatgccctttgtgagccagaaatagtgtctgccttttgaactaaattcattaacaattctttaaaataccctagtgattataggtagccctgcccttagttgtaaaactagtagatacggtcagattaatggacgaaactgctcagtacatgaggtttaaatgttaggtggataagacttatttgaagagttcttgctttgccttatgcggtttgtctctagttactgggtgactttatttggtaaaaaagcgttcagctgcagtagcatattcaagtgttgctagttagtaattatctttttaattttttgttttagtttaaaagattggaagacccgtttgagctacttcttacaaaattcctctactcctgggaagcccaaaaccggcaaaaaaagcaaacagcaagctttcatcaagtaagttgagaatcctgtgcttgcaaatatcaatagttagctgctgaactgaaaaggggaactctgatgtgcgtaagctaacatacagaacctctcttgcaggccttctcctgaggaagcacagctgtggtcagaagcatttgacgagctgctagccagcaaatgtaagttaactcttgagcttgagccattgctaacatcgcaaaagcctggaaaggctgcgtccacctaacaaaagagcagcttgcctgagggggattagactgcagtcactataggataaagcctgtttttctttcctttatttcccagggtttaacaaataaatgcatatattctctccaggtggggaagaaaatcagcctaaacaaattaaagtggcagttgcttatagttaaggttgagtcagtttttccattgcatacaatgttttcaagaggcttagttcccagagaatttatggctcccctataaatatttactttgcattgacagcaaagtacttatatttttgcagcagagtgccaacataagccttttgcctactggtatcttagtctttaaaaagctaaattttgagaattacaggtttgagcgaaatctagaaaattcatttagaaataattaaaatgtgagggataggagaaacataaggaatcatttggtctctcagttcttcacattctgcatgctcttttctccccccttcagatggtcttgctgcattcagggcttttttaaagtcggaattctgtgaagaaaatattgaattctggctggcctgtgaagacttcaaaaaaaccaaatcaccccaaaagctgtcctcaaaagcaaggaaaatatatactgacttcatagaaaaggaagctccaaaagaggtaaggaaacaagttcctaatttcagcacaatctggacatctttagcacaaaagtgaaacagtaatcaaggacaaagcgggctaggaggggtaaaaagtccctccacgttgtagctttcagttatgttaaagttctcctgtgacttagctagtaaagctaatcacacataatttttattttttgttttcaaatactaaattttaatctttaactctgaataccaaataaacaacttttttgttttatttcagataaacatagattttcaaaccaaaactctgattgcccagaatatacaagaagctacaagtggctgctttacaactgcccagaaaagggtatacagcttgatggagaacaactcttatcctcgtttcttggagtcagaattctaccaggacttgtgtaaaaagccacaaatcaccacagagcctcatgctacatgaaatgtaaaagggagcccagaaatggaggacatttcattctttttcctgaggggaaggactgtgacctgccataaagactgaccttgaattcagcctgggtgttcaggaaacatcactcagaactattgattcaaagttgggtagtgaatcaggaagccagtaactgactaggagaagctggtatcagaacagcttccctcactgtgtacagaacgcaagaagggaataggtggtctgaacgtggtgtctcactctgaaaagcaggaatgtaagatgatgaaagagacaatgtaatactgttggtccaaaagcatttaaaatcaatagatctgggattatgtggccttaggtagctggttgtacatctttccctaaatcgatccatgttaccacatagtagttttagtttaggattcagtaacagtgaagtgtttactatgtgcaagggtattgaagttcttatgaccacagatcatcagtactgttgtctcatgtaatgctaaaactgaaatggtccgtgtttgcattgttaaaaatgatgtgtgaaatagaatgagtgctatggtgttgaaaactgcagtgtccgttatgagtgccaaaaatctgtcttgaaggcagctacactttgaagtggtctttgaatacttttaataaatttattttgataaataatattgaacacttggagtctagatgtgattttatttttgataactggaaatgtggcagataaagggaaaaacatctttatagtaaaagacatttcagtttttgtgcctgcccagtgagaattgacagtcttcagaactgagaaatgatagttgcagacagataattctttttttaaaacctataagcattatgcagacctaaggaagtcacatccttagaaccactgcatttatgctttctagtcttaaaaaaaaaatcaagcttctcaaatgaagaaagaagccaaataaggtcaatgtatgcctgtctttatttactttccattggttccaagctcccccacaagtaccagcatgggcttccaagatacatacctgaaattgttcccttccataatgtatcaatagaaaatctcagaattttcctgattttcatgccttcatttggccaacaaagaatctgttactttaggtaatgataaagtcaaaagaagtgcgctttcgtttcttagacttaaatccagaaatgtgcttttttccacttgagagaggaagcccttgaatctgttttcaaactggctaattaaaaagcaccccttcctcagcaggctgtttttttcaatgtccttgattatggtcttaataaaaaaggaggaggaaccctgattttagagttggaagaactgacgcaaagtaatcatttctcatagctttgtgaccttggtgtccccattgtcttctctgactcttcattttagaccttcctgcctttctggttttataaagtagtaagggactttagaaatcataaagcactaagaacattttttttctgatttgccagaagaaaaattgacctccagtagtttactgtttccattgtgattgcactaattttcaccttagccagagtttctggcaccaacagacacaagctctattagagagactgccttgtctactgtatcacagcagccagaataatacataataggtgctccataaatattgattgaataaatgaatccaaagagtcattgaaagcaaatatttctttggagaataaatgtgtcaggtctagcataatccttaatttggaaagattttgaccaacagaggaactcaggagtcatgccatatatcatcctatttgtcaccaagtcatttattttacttcaaacctctctacagcctactctctgttaccactctgatcaaagacaccacgatctgatgcctagattactgcaatagtctcatctcctctcacccactcttccccctctcccacaccaatgtgttcctgccttttaactctagggatcccttcaagacaaatctgatcttgtctccagttgcttataaacacttgacaggttttgcaaacaattaggataaagacagtatctctaatatggcctaacacctgcatggcttgacccctccttttgttccaaccttgactctaccacatttctcccagctctttctgctaagccacactgtcctactttcctagcaggtgccatcgccactggcctcacaggaccttagcacctaatagttcctctgcatggaattc

SEQ ID NO: 692 - DNA, 2464 bp, Homo sapiens
cggaaacttgggggagtgcacagaagaacttcgggagcgcacgcgggaccagggaccaggctgagactcggggcgccagtccgggcaggggcagcgggacgcggccggagatgccctgtatccaagcccaatatgggacaccagcaccgagtccgggaccccgtgaccacctggcaagcgaccccctgacccctgagttcatcaagcccaccatggacctggccagccccgaggcagcccccgctgcccccactgccctgcccagcttcagcacgttcatggacggctacacaggagagtttgacaccttcctctaccagctgccaggaacagtccagccatgctcctcagcctcctcctcggcctcctccacatcctcgtcctcagccacctcccctgcctctgcctccttcaagttcgaggacttccaggtgtacggctgctaccccggccccctgagcggcccagtggatgaggccctgtcctccagtggctctgactactatggcagcccctgctcggccccgtcgccctccacgcccagcttccagccgccccagctctctccctgggatggctccttcggccacttctcgcccagccagacttacgaaggcctgcgggcatggacagagcagctgcccaaagcctctgggcccccacagcctccagccttcttttccttcagtcctcccactggccccagccccagcctggcccagagccccctgaagttgttcccctcacaggccacccaccagctgggggagggagagagctattccatgcctacggccttcccaggtttggcacccacttctccacaccttgagggctcggggatactggatacacccgtgacctcaaccaaggcccggagcggggccccaggtccaagtgaaggccgctgtgctgtgtgtggggacaacgcttcatgccagcattatggtgtccgcacatgtgagggctgcaagggcttcttcaagcgcacagtgcagaaaaacgccaagtacatctgcctggctaacaaggactgccctgtggacaagaggcggcgaaaccgctgccagttctgccgcttccagaagtgcctggcggtgggcatggtgaaggaagttgtccgaacagacagcctgaaggggcggcggggccggctaccttcaaaacccaagcagcccccagatgcctcccctgccaatctcctcacttccctggtccttgcacacctggattcagggcccagcactgccaaactggactactccaagttccaggagctggtgctgccccactttgggaaggaagatgctggggatgtacagcagttctacgacctgctctccggttctctggaggtcatccgaaagtgggcggagaagatccctggctttgctgagctgtcaccggctgaccaggacctgttgctggagtcggccttcctggagctcttcatcctccgcctggcgtacaggtctaagccaggcgagggcaagctcatcttctgctcaggcctggtgctacaccggctgcagtgtgcccgtggcttcggggactggattgacagtatcctggccttctcaaggtccctgcacagcttgcttgtcgatgtccctgccttcgcctgcctctctgcccttgtcctcatcaccgaccggcatgggctgcaggagccgcggcgggtggaggagctgcagaaccgcatcgccagctgcctgaaggagcacgtggcagctgtggcgggcgagccccagccagccagctgcctgtcacgtctgttgggcaaactgcccgagctgcggaccctgtgcacccagggcctgcagcgcatcttctacctcaagctggaggacttggtgccccctccacccatcattgacaagatcttcatggacacgctgcccttctgacccctgcctgggaacacgtgtgcacatgcgcactctcatatgccaccccatgtgcctttagtccacggacccccagagcacccccaagcctgggcttgagctgcagaatgactccaccttctcacctgctccaggaggtttgcagggagctcaagcccttggggagggggatgccttcatgggggtgaccccacgatttgtcttatcccccccagcctggccccggcctttatgttttttgtaagataaaccgtttttaacacatagcgccgtgctgtaaataagcccagtgctgctgtaaatacaggaagaaagagcttgaggtgggagcggggctgggaggaagggatgggccccgccttcctgggcagcctttccagcctcctgcctggctctctcttcctaccctccttccacatgtacataaactgtcactctaggaagaagacaaatgacagattctgacatttatatttgtgtattttcctggatttatagtatgtgacttttctgattaatatatttaatatattgaataaaaaatagacatgtagttg

SEQ ID NO: 693 - DNA, 3639 bp, Homo sapiens
aagtcttctgaattgtttttctggacttccaaatctcaagtgataagaccagcagaagcagatataaagacctgaagatagtcttttctgtccaaagatggaaaacagtactactaccatttctcgggaggagcttgaagaactacaagaggcatttaataaaatagatattgacaatagtgggtatgtcagtgactatgaacttcaagacctgtttaaggaagcaagccttcctctgcctggctacaaggtgcgcgagattgtggagaaaattctatcagttgctgacagcaacaaagatggcaaaatcagttttgaagagtttgtgtcactaatgcaagaattaaaaagcaaagatatcagcaaaacattccgaaaaataattaacaagagggaagggattactgctattggaggaacttcaactatttccagtgagggcacacagcattcttattcagaggaagaaaaagtggcttttgttaactggataaacaaagccctggagaatgaccctgactgtaagcatcttatacccatgaatcccaatgatgatagtcttttcaagtcacttgcagatggcatccttctttgcaaaatgatcaacttatctgaaccagatacaattgatgaaagagccatcaataagaaaaagctcacgccattcactatttctgaaaatttaaacctagctctgaattctgcctcagccattggttgtacagtggtcaacattggtgcatcagatctcaaagaaggaaaacctcacttggtcttgggacttctctggcagatcatcaaagttggcctttttgctgatattgagatttccaggaatgaagctctgattgcattgttaaatgaaggtgaggaactagaggagctgatgaagctttctcccgaggaattactgctgcgatgggtgaactaccatctgaccaatgcaggatggcataccatcagcaacttcagccaagacattaaggactcgagagcctattttcatctgcttaatcagattgcccctaaaggtggggaagatggacctgccattgccattgacctttcaggaattaatgagacaaatgacctgaagcgtgctggactcatgcttcaagaagcagataaactgggctgcaaacagtttgttactcctgcagatgtggtttcaggcaatcctaaacttaatttagcttttgtagctaatttgtttaacacatacccgtgcctgcacaagccgaataataatgacatcgatatgaatttactggaaggagagagcaaggaagagagaacatttcggaactggatgaattccttgggagtcaacccatacattaatcatttgtacagtgaccttgcagatgctttagtgatctttcagctctatgagatgatccgagtgccagtcaactggagccatgtcaacaaacctccttatcctgcccttggagggaacatgaagaagattgaaaactgtaactatgcagtggaacttgggaagaacaaggccaaattctccttggttggcattgctgggcaggacctaaatgaaaggaattcaacacttaccctggcattggtatggcagctgatgagaaggtacacattgaatgtgttatcggatcttggagagggtgaaaaagtaaatgatgaaattataattaaatgggtcaatcagactcttaaaagtgcaaacaaaaagacttctatttccagcttcaaggataaatctataagcacaagtttacctgtcctagatttaatagatgccattgcgccaaatgcagttcgtcaagaaatgatcaggagagaaaacttatctgatgaggacaagctgaacaatgctaaatacgccatttcagttgctcgaaagatcggtgcccggatatatgcattacctgatgacctcgtagaagtgaaaccaaagatggttatgacggtgtttgcatgcttaatgggaaaaggactgaacagaataaaataatcatttcatatgattttctgccacattaaacatattgtatgcctcacagtttacaggattctgaaatgtagtgggtgtaaaaccagagattatttgtatgctcaaaatagttatatattcattaatgaattcaatatcctgttcatactagttagagctggtcagcctttttgggtaacacagttaatttaccaactgatacagataatagaatatattcataatcaagctgatacttcatgattaaattatttttgttgcttaaaagtcgtattagacaagactaaatcattcttttttatggttcaaaaaagatgaatacaaacgtttttgcaggttctgctgtgaaatgtggtttgatttttttggtgtgttaattttgatcataaatgcattcatactcataatccagtttaatccttttatttgcttcctccaactatttaaagtggtccaaaaacacttttctgtaagtttctatactgtctaaaaccttatggtgaccagaattgtttattaatatcaaacttttttatatatgagaactaattcttgaataaaccccaaagttcactctcttgtttaagtagcagcagctttttacttaaaatttaattttaactacattgatactttacacatcctagtttggtaacacagctttaactatgtcatgcaacatatatatgttggtaggatgttattagagagatatgtgtgcatatatatttttttgcacctgaatcacccagcttttcataagtggtatgtttaattggtcattcagccaaccatcagtattttccccccacgacatgtgtaacacttttcagtctgtggatatctgatacattaagatttctttttataagtattcattttgaatgtgcatatagtcatttgaccccttccaaatacttgtagccaaacattggctagaacatcccaagatatgctgacactgtcctgttagcttcatattatacttgctagtttaggtctctatagaagccctatataatttagaatatgcccactgaatatctttaatagaaagtaacataaagctagtattcaatgtagagtattttcatatgtttttcacagcccgttacaaattggcaatgtttggttaatgtttgtattacttggaaatcgctacagcttggactatttttttctaaatttttagcattagtccatttctgctgctaacaattgaatccagaaatctactttctccatcttccactgttagtgccagtgagcaatactgttgtgcaacaaaaatgtcactttatctcagtgtgaatgagtagtctaaattccctttctaccattgatttaaatatatatattggtaagagagactgcccatgtgtttagaatagaattttttaaatgaaatgatcaacaggtggaatttgaaatatattcttctacaaaagagatttctttcccttttatattttgatgattgttttcttaagattaagatatgttcttgctcttttataagattatttaaattatgtttccctctgattttttttcaccattgtatttactaagttattggatttacatgaaatctggcactttagggtgttctttttctcacagagtatatttaataaaaatgctgtgtatat

SEQ ID NO: 694 - DNA, 3220 bp, Homo sapiens
gagctgtccccggtgccgccgacccgggccgtgccgtgtgcccgtggctccagccgctgccgcctcgatctcctcgtctcccgctccgccctcccttttccctggatgaacttgcgtcctttctcttctccgccatggaattctgctccgtgcttttagccctcctgagccaaagaaaccccagacaacagatgcccatacgcagcgtatagcagtaactccccagctcggtttctgtgccgtagtttacagtatttaattttatataatatatattatttattatagcatttttgatacctcatattctgtttacacatcttgaaaggcgctcagtagttctcttactaaacaaccactactccagagaatggcaacgctgattaccagtactacagctgctaccgccgcttctggtcctttggtggactacctatggatgctcatcctgggcttcattattgcatttgtcttggcattctccgtgggagccaatgatgtagcaaattcttttggtacagctgtgggctcaggtgtagtgaccctgaagcaagcctgcatcctagctagcatctttgaaacagtgggctctgtcttactgggggccaaagtgagcgaaaccatccggaagggcttgattgacgtggagatgtacaactcgactcaagggctactgatggccggctcagtcagtgctatgtttggttctgctgtgtggcaactcgtggcttcgtttttgaagctccctatttctggaacccattgtattgttggtgcaactattggtttctccctcgtggcaaaggggcaggagggtgtcaagtggtctgaactgataaaaattgtgatgtcttggttcgtgtccccactgctttctggaattatgtctggaattttattcttcctggttcgtgcattcatcctccataaggcagatccagttcctaatggtttgcgagctttgccagttttctatgcctgcacagttggaataaacctcttttccatcatgtatactggagcaccgttgctgggctttgacaaacttcctctgtggggtaccatcctcatctcggtgggatgtgcagttttctgtgcccttatcgtctggttctttgtatgtcccaggatgaagagaaaaattgaacgagaaataaagtgtagtccttctgaaagccccttaatggaaaaaaagaatagcttgaaagaagaccatgaagaaacaaagttgtctgttggtgatattgaaaacaagcatcctgtttctgaggtagggcctgccactgtgcccctccaggctgtggtggaggagagaacagtctcattcaaacttggagatttggaggaagctccagagagagagaggcttcccagcgtggacttgaaagaggaaaccagcatagatagcaccgtgaatggtgcagtgcagttgcctaatgggaaccttgtccagttcagtcaagccgtcagcaaccaaataaactccagtggccactcccagtatcacaccgtgcataaggattccggcctgtacaaagagctactccataaattacatcttgccaaggtgggagattgcatgggagactccggtgacaaacccttaaggcgcaataatagctatacttcctataccatggcaatatgtggcatgcctctggattcattccgtgccaaagaaggtgaacagaagggcgaagaaatggagaagctgacatggcctaatgcagactccaagaagcgaattcgaatggacagttacaccagttactgcaatgctgtgtctgaccttcactcagcatctgagatagacatgagtgtcaaggcagcgatgggtctaggtgacagaaaaggaagtaatggctctctagaagaatggtatgaccaggataagcctgaagtctctctcctcttccagttcctgcagatccttacagcctgctttgggtcattcgcccatggtggcaatgacgtaagcaatgccattgggcctctggttgctttatatttggtttatgacacaggagatgtttcttcaaaagtggcaacaccaatatggcttctactctatggtggtgttggtatctgtgttggtctgtgggtttggggaagaagagttatccagaccatggggaaggatctgacaccgatcacaccctctagtggcttcagtattgaactggcatctgccctcactgtggtgattgcatcaaatattggccttcccatcagtacaacacattgtaaagtgggctctgttgtgtctgttggctggctccggtccaagaaggctgttgactggcgtctctttcgtaacatttttatggcctggtttgtcacagtccccatttctggagttatcagtgctgccatcatggcaatcttcagatatgtcatcctcagaatgtgaagctgtttgagattaaaatttgtgtcaatgtttgggaccatcttaggtattcctgctcccctgaagaatgattacagtgttaacagaagactgacaagagtctttttatttgggagcagaggagggaagtgttacttgtgctataactgcttttgtgctaaatatgaattgtctcaaaattagctgtgtaaaatagcccgggttccactggctcctgctgaggtcccctttccttctgggctgtgaattcctgtacatatttctctactttttgtatcaggcttcaattccattatgttttaatgttgtctctgaagatgacttgtgatttttttttcttttttttaaaccatgaagagccgtttgacagagcatgctctgcgttgttggtttcaccagcttctgccctcacatgcacagggatttaacaacaaaaatataactacaacttcccttgtagtctcttatataagtagagtccttggtactctgccctcctgtcagtagtggcaggatctattggcatattcgggagcttcttagagggatgaggttctttgaacacagtgaaaatttaaattagtaacttttttgcaagcagtttattgactgttattgctaagaagaagtaagaaagaaaaagcctgttggcaatcttggttatttctttaagatttctggcagtgtgggatggatgaatgaagtggaatgtgaactttgggcaagttaaatgggacagccttccatgttcatttgtctacctcttaactgaataaaaaagcctacagtttttagaaaaaacccgaattc

SEQ ID NO: 695 - DNA, 15720 bp, Homo sapiens
caacccacaccgcccctgccagccaccatggggctgccactagcccgcctggcggctgtgtgcctggccctgtctttggcagggggctcggagctccagacagagggcagaacccgataccacggccgcaacgtctgcagcacctggggcaacttccactacaagaccttcgacggggacgtcttccgcttccccggcctctgcgactacaacttcgcctccgactgccgaggctcctacaaggaatttgctgtgcacctgaagcggggtccgggccaggctgaggcccccgccggggtggagtccatcctgctgaccatcaaggatgacaccatctacctcacccgccacctggctgtgcttaacggggccgtggtcagcaccccgcactacagccccgggctgctcattgagaagagcgatgcctacaccaaagtctactcccgcgccggcctcaccctcatgtggaaccgggaggatgcactcatgctggagctggacactaagttccggaaccacacctgtggcctctgcggggactacaacggcctgcagagctattcagaattcctctctgacggcgtgctcttcagtcccctggagtttgggaacatgcagaagatcaaccagcccgatgtggtgtgtgaggatcccgaggaggaggtggcccccgcatcctgctccgagcaccgcgccgagtgtgagaggctgctgaccgccgaggccttcgcggactgtcaggacctggtgccgctggagccgtatctgcgcgcctgccagcaggaccgctgccggtgcccgggcggtgacacctgcgtctgcagcaccgtggccgagttctcccgccagtgctcccacgccggcggccggcccgggaactggaggaccgccacgctctgccccaagacctgccccgggaacctggtgtacctggagagcggctcgccctgcatggacacctgctcacacctggaggtgagcagcctgtgcgaggagcaccgcatggacggctgtttctgcccagaaggcaccgtatatgacgacatcggggacagtggctgcgttcctgtgagccagtgccactgcaggctgcacggacacctgtacacaccgggccaggagatcaccaatgactgcgagcagtgtgtctgtaacgctggccgctgggtgtgcaaagacctgccctgccccggcacctgtgccctggaaggcggctcccacatcaccaccttcgatgggaagacgtacaccttccacggggactgctactatgtcctggccaagggtgaccacaacgattcctacgctctcctgggcgagctggccccctgtggctccacagacaagcagacctgcctgaagacggtggtgctgctggctgacaagaagaagaatgcggtggtcttcaagtccgatggcagtgtactgctcaaccagctgcaggtgaacctgccccacgtgaccgcgagcttctctgtcttccgcccgtcttcctaccacatcatggtgagcatggccattggcgtccggctgcaggtgcagctggccccagtcatgcaactctttgtgacactggaccaggcctcccaggggcaggtgcagggcctctgcgggaacttcaacggcctggaaggtgacgacttcaagacggccagcgggctggtggaggccacgggggccggctttgccaacacctggaaggcacagtcaacctgccatgacaagctggactggttggacgatccctgctccctgaacatcgagagcgccaactacgccgagcactggtgctccctcctgaagaagacagagaccccctttggcaggtgccactcggctgtggaccctgctgagtattacaagaggtgcaaatatgacacgtgtaactgtcagaacaatgaggactgcctgtgcgccgccctgtcctcctacgcgcgcgcctgcaccgccaagggcgtcatgctgtggggctggcgggagcatgtctgcaacaaggatgtgggctcctgccccaactcgcaggtcttcctgtacaacctgaccacctgccagcagacctgccgctccctctccgaggccgacagccactgtctcgagggctttgcgcctgtggacggctgcggctgccctgaccacaccttcctggacgagaagggccgctgcgtacccctggccaagtgctcctgttaccaccgcggtctctacctggaggcgggggatgtggtcgtcaggcaggaagaacgatgtgtgtgccgggatgggcggctgcactgtaggcagatccggctgatcggccagagctgcacggccccaaagatccacatggactgcagcaacctgactgcactggccacctcgaagccccgagccctcagctgccagacgctggccgccggctattaccacacagagtgtgtcagtggctgtgtgtgccccgacgggctgatggatgacggccggggtggctgcgtggtggagaaggaatgcccttgcgtccataacaacgacctgtattcttccggcgccaagatcaaggtggactgcaatacctgcacctgcaagagaggacgctgggtgtgcacccaggctgtgtgccatggcacctgctccatttacgggagtggccactacatcacctttgatgggaagtactacgactttgacggacactgctcctacgtggctgttcaggactactgcggccagaactcctcactgggctcattcagcatcatcaccgagaacgtcccctgtggcactacgggcgtcacctgctccaaggccatcaagatcttcatggggaggacggagctgaagttggaagacaagcaccgtgtggtgatccagcgtgatgagggtcaccacgtggcctacaccacgcgggaggtgggccagtacctggtggtggagtccagcacgggcatcatcgtcatctgggacaagaggaccaccgtgttcatcaagctggctccctcctacaagggcaccgtgtgtggcctgtgtgggaactttgaccaccgctccaacaacgacttcaccacgcgggaccacatggtggtgagcagcgagctggacttcgggaacagctggaaggaggcccccacctgcccagatgtgagcaccaaccccgagccctgcagcctgaacccgcaccgccgctcctgggccgagaagcagtgcagcatcctcaaaagcagcgtgttcagcatctgccacagcaaggtggaccccaagcccttctacgaggcctgtgtgcacgactcgtgctcctgtgacacgggtggggactgtgagtgcttctgctctgccgtggcctcctacgcccaggagtgtaccaaagagggggcctgcgtgttctggaggacgccggacctgtgccccatattctgcgactactacaaccctccgcatgagtgtgagtggcactatgagccatgtgggaaccggagcttcgagacctgcaggaccatcaacggcatccactccaacatctccgtgtcctacctggagggctgctacccccggtgccccaaggacaggcccatctatgaggaggatctgaagaagtgtgtcactgcagacaagtgtggctgctatgtcgaggacacccactacccacctggagcatcggttcccaccgaggagacctgcaagtcctgcgtgtgtaccaactcctcccaagtcgtctgcaggccggaggaaggaaagattcttaaccagacccaggatggcgccttctgctactgggagatctgtggccccaacgggacggtggagaagcacttcaacatctgttccattacgacacgcccgtccaccctgaccaccttcaccaccatcaccctccccaccacccccacctccttcaccactaccaccaccaccaccaccccgacctccagcacagttttatcaacaactccgaagctgtgctgcctctggtctgactggatcaatgaggaccaccccagcagtggcagcgacgacggtgaccgagaaccatttgatggggtctgcggggcccctgaggacatcgagtgcaggtcggtcaaggatccccacctcagcttggagcagcatggccagaaggtgcagtgtgatgtctctgttgggttcatttgcaagaatgaagaccagtttggaaatggaccatttggactgtgttacgactacaagatacgtgtcaattgttgctggcccatggataagtgtatcaccactcccagccctccaactaccactcccagccctccaccaaccacgacgaccacccttccaccaaccaccacccccagccctccaaccaccaccacaaccacccctccaccaaccaccacccccagccctccaataaccaccacgaccacccctctaccaaccaccactcccagccctccaataagcaccacaaccacccctccaccaaccaccactcccagccctccaaccaccactcccagccctccaaccaccactcccagccctccaacaaccaccacaaccacccctccaccaaccaccactcccagccctccaatgactacgcccatcactccaccagccagcactaccacccttccaccaaccaccactcccagccctccaacaaccaccacaaccacccctccaccaaccaccactcccagtcctccaacgactacgcccatcactccaccaaccagcactactacccttccaccaaccaccactcccagccctccaccaaccaccacaaccacccctccaccaaccaccactcccagccctccaacaaccaccactcccagtcctccaacaatcaccacaaccacccctccaccaaccaccactcccagccctccaacaacgaccacaaccacccctccaccaaccaccactcccagccctccaacgactacacccatcactccaccaaccagcactaccacccttccaccaaccaccactcccagccctccaccaaccaccacaaccacccctccaccaaccaccactcccagccctccaacaaccaccactcccagccctccaataaccaccacaaccacccctccaccaaccaccactcccagctctccaataaccaccactcccagccctccaacaaccaccatgaccaccccttcaccaaccaccacccccagctctccaataaccaccacaaccaccccttcctcaactaccactcccagccctccaccaaccaccatgaccaccccttcaccaaccaccactcccagccctccaacaaccaccatgaccacccttccaccaaccaccacttccagccctctaacaactactcctctacctccatcaataactcctcctacattttcaccattctcaacgacaacccctactaccccatgcgtgcctctctgcaattggactggctggctggattctggaaaacccaactttcacaaaccaggtggagacacagaattgattggagacgtctgtggaccaggctgggcagctaacatctcttgcagagccaccatgtatcctgatgttcccattggacagcttggacaaacagtggtgtgtgatgtctctgtggggctgatatgcaaaaatgaagaccaaaagccaggtggggtcatccctatggccttctgcctcaactacgagatcaacgttcagtgctgtgagtgtgtcacccaacccaccaccatgacaaccaccaccacagagaacccaactccgccaaccacgacacccatcaccaccaccactacggtgaccccaaccccaacacccaccggcacacagaccccaaccacgacacccatcaccaccaccactacggtgaccccaaccccaacacccaccggcacacagaccccaaccacgacacccatcaccaccaccactacggtgaccccaaccccaacacccaccggcacacagaccccaaccacgacacccatcaccaccaccactacggtgaccccaaccccaacacccaccggcacacagaccccaaccacgacacccatcaccaccaccactacggtgaccccaaccccaacacccaccggcacacagaccccaaccacgacacccatcaccaccaccactacggtgaccccaaccccaacacccaccggcacacagaccccaaccacgacacccatcaccaccaccactacggtgaccccaaccccaacacccaccggcacacagaccccaaccacgacacccatcaccaccaccactacggtgaccccaaccccaacacccaccggcacacagaccccaaccacgacacccatcaccaccaccactacggtgaccccaaccccaacacccaccggcacacagaccccaaccacgacacccatcaccaccaccactacggtgaccccaaccccaacacccaccggcacacagaccccaaccacgacacccatcaccaccaccactacggtgaccccaaccccaacacccaccggcacacagaccccaaccacgacacccatcaccaccaccactacggtgaccccaaccccaacacccaccggcacacagaccccaaccacgacacccatcaccaccaccactacggtgaccccaaccccaacacccaccggcacacagaccccaaccacgacacccatcaccaccaccactacggtgaccccaaccccaacacccaccggcacacagaccccaaccacgacacccatcaccaccaccactacggtgaccccaaccccaacacccaccggcacacagaccccaaccacgacacccatcaccaccaccactacggtgaccccaaccccaacacccaccggcacacagaccccaaccacgacacccatcaccaccaccactacggtgaccccaaccccaacacccaccggcacacagaccccaaccacgacacccatcaccaccaccactacggtgaccccaaccccaacacccaccggcacacagaccccaaccacgacacccatcaccaccaccactacggtgaccccaaccccaacacccaccggcacacagaccccaaccacgacacccatcaccaccaccactacggtgaccccaaccccaacacccaccggcacacagaccccaaccacgacacccatcaccaccaccactacggtgaccccaaccccaacacccaccggcacacagaccccaaccacgacacccatcaccaccaccactacggtgaccccaaccccaacacccaccggcacacagaccccaaccacgacacccatcaccaccaccactacggtgaccccaaccccaacacccaccggcacacagaccccaaccacgacacccatcaccaccaccactacggtgaccccaaccccaacacccaccggcacacagaccccaaccacgacacccatcaccaccaccactacggtgaccccaaccccaacacccaccggcacacagaccccaaccacgacacccatcaccaccaccactacggtgaccccaaccccaacacccaccggcacacagaccccaaccacgacacccatcaccaccaccactacggtgaccccaaccccaacacccaccggcacacagaccccaaccacgacacccatcaccaccaccactacggtgaccccaaccccaacacccaccggcacacagaccccaaccacgacacccatcaccaccaccactacggtgaccccaaccccaacacccaccggcacacagaccccaaccacgacacccatcaccaccaccactacggtgaccccaaccccaacacccaccggcacacagaccccaaccacgacacccatcaccaccaccactacggtgaccccaaccccaacacccaccggcacacagaccccaaccacgacacccatcaccaccaccactacggtgaccccaaccccaacacccaccggcacacagaccccaaccacgacacccatcaccaccaccactacggtgaccccaaccccaacacccaccggcacacagaccccaaccacgacacccatcaccaccaccactacggtgaccccaaccccaacacccaccggcacacagaccccaaccacgacacccatcaccaccaccactacggtgaccccaaccccaacacccaccggcacacagaccccaaccacgacacccatcaccaccaccactacggtgaccccaaccccaacacccaccggcacacagaccccaaccacgacacccatcaccaccaccactacggtgaccccaaccccaacacccaccggcacacagaccccaaccacgacacccatcaccaccaccactacggtgaccccaaccccaacacccaccggcacacagaccccaaccacgacacccatcaccaccaccactacggtgaccccaaccccaacacccaccggcacacagaccccaaccacgacacccatcaccaccaccactacggtgaccccaaccccaacacccaccggcacacagaccccaaccacgacacccatcaccaccaccactacggtgaccccaaccccaacacccaccggcacacagaccccaaccacgacacccatcaccaccaccactacggtgaccccaaccccaacacccaccggcacacagaccccaaccacgacacccatcaccaccaccactacggtgaccccaaccccaacacccaccggcacacagaccccaaccacgacacccatcaccaccaccactacggtgaccccaaccccaacacccaccggcacacagaccccaaccacgacacccatcaccaccaccactacggtgaccccaaccccaacacccaccggcacacagaccccaaccacgacacccatcaccaccaccactacggtgaccccaaccccaacacccaccggcacacagaccccaaccacgacacccatcaccaccaccactacggtgaccccaaccccaacacccaccggcacacagaccccaaccacgacacccatcaccaccaccactacggtgaccccaaccccaacacccaccggcacacagaccccaaccacgacacccatcaccaccaccactacggtgaccccaaccccaacacccaccggcacacagaccccaaccacgacacccatcaccaccaccactacggtgaccccaaccccaacacccaccggcacacagaccccaaccacgacacccatcaccaccaccactacggtgaccccaaccccaacacccaccggcacacagaccccaaccacgacacccatcaccaccaccactacggtgaccccaaccccaacacccaccggcacacagaccccaaccacgacacccatcaccaccaccactacggtgaccccaaccccaacacccaccggcacacagaccccaaccacgacacccatcaccaccaccactacggtgaccccaaccccaacacccaccggcacacagaccccaaccacgacacccatcaccaccaccactacggtgaccccaaccccaacacccaccggcacacagaccccaaccacgacacccatcaccaccaccactacggtgaccccaaccccaacacccaccggcacacagaccccaaccacgacacccatcaccaccaccactacggtgaccccaaccccaacacccaccggcacacagaccccaaccacgacacccatcaccaccaccactacggtgaccccaaccccaacacccaccggcacacagaccccaaccacgacacccatcaccaccaccactacggtgaccccaaccccaacacccaccggcacacagaccccaaccacgacacccatcaccaccaccactacggtgaccccaaccccaacacccaccggcacacagaccccaaccacgacacccatcaccaccaccactacggtgaccccaaccccaacacccaccggcacacagaccccaaccacgacacccatcaccaccaccactacggtgaccccaaccccaacacccaccggcacacagaccccaaccacgacacccatcaccaccaccactacggtgaccccaaccccaacacccaccggcacacagaccccaaccacgacacccatcaccaccaccactacggtgaccccaaccccaacacccaccggcacacagaccccaaccacgacacccatcaccaccaccactacggtgaccccaaccccaacacccaccggcacacagaccccaaccacgacacccatcaccaccaccactacggtgaccccaaccccaacacccaccggcacacagaccccaaccacgacacccatcaccaccaccactacggtgaccccaaccccaacacccaccggcacacagaccccaaccacgacacccatcaccaccaccactacggtgaccccaaccccaacacccaccggcacacagaccccaaccacgacacccatcaccaccaccactacggtgaccccaaccccaacacccaccggcacacagaccccaaccacgacacccatcaccaccaccactacggtgaccccaaccccaacacccaccggcacacagaccccaaccacgacacccatcaccaccaccactacggtgaccccaaccccaacacccaccggcacacagaccccaaccacgacacccatcaccaccaccactacggtgaccccaaccccaacacccaccggcacacagaccccaaccacgacacccatcaccaccaccactacggtgaccccaaccccaacacccaccggcacacagaccccaaccacgacacccatcaccaccaccactacggtgaccccaaccccaacacccaccggcacacagaccccaaccacgacacccatcaccaccaccactacggtgaccccaaccccaacacccaccggcacacagaccccaaccacgacacccatcaccaccaccactacggtgaccccaaccccaacacccaccggcacacagaccccaaccacgacacccatcaccaccaccactacggtgaccccaaccccaacacccaccggcacacagaccccaaccacgacacccatcaccaccaccactacggtgaccccaaccccaacacccaccggcacacagaccccaaccacgacacccatcaccaccaccactacggtgaccccaaccccaacacccaccggcacacagaccccaaccacgacacccatcaccaccaccactacggtgaccccaaccccaacacccaccggcacacagaccccaaccacgacacccatcaccaccaccactacggtgaccccaaccccaacacccaccggcacacagaccccaaccacgacacccatcaccaccaccactacggtgaccccaaccccaacacccaccggcacacagaccccaaccacgacacccatcaccaccaccactacggtgaccccaaccccaacacccaccggcacacagaccccaaccacgacacccatcaccaccaccactacggtgaccccaaccccaacacccaccggcacacagaccccaaccacgacacccatcaccaccaccactacggtgaccccaaccccaacacccaccggcacacagaccccaaccacgacacccatcaccaccaccactacggtgaccccaaccccaacacccaccggcacacagaccccaaccacgacacccatcaccaccaccactacggtgaccccaaccccaacacccaccggcacacagaccccaaccacgacacccatcaccaccaccactacggtgaccccaaccccaacacccaccggcacacagaccccaaccacgacacccatcaccaccaccactacggtgaccccaaccccaacacccaccggcacacagaccccaaccacgacacccatcaccaccaccactacggtgaccccaaccccaacacccaccggcacacagaccccaaccacgacacccatcaccaccaccactacggtgaccccaaccccaacacccaccggcacacagaccccaaccacgacacccatcaccaccaccactacggtgaccccaaccccaacacccaccggcacacagaccccaaccacgacacccatcaccaccaccactacggtgaccccaaccccaacacccaccggcacacagaccccaaccacgacacccatcaccaccaccactacggtgaccccaaccccaacacccaccggcacacagaccccaaccacgacacccatcaccaccaccactacggtgaccccaaccccaacacccaccggcacacagaccccaaccacgacacccatcaccaccaccactacggtgaccccaaccccaacacccaccggcacacagaccccaaccacgacacccatcaccaccaccactacggtgaccccaaccccaacacccaccggcacacagaccccaaccacgacacccatcaccaccaccactacggtgaccccaaccccaacacccaccggcacacagaccccaaccacgacacccatcaccaccaccactacggtgaccccaaccccaacacccaccggcacacagaccccaaccacgacacccatcaccaccaccactacggtgaccccaaccccaacacccaccggcacacagaccgggccccccacccacacaagcacagcaccgattgctgagttgaccacatccaatcctccgcctgagtcctcaacccctcagacctctcggtccacctcttcccctctcacggagtcaaccacccttctgagtaccctaccacctgccattgagatgaccagcacggccccaccctccacacccacggcacccacgaccacgagcggaggccacacactgtctccaccgcccagcaccaccacgtcccctccaggcacccccactcgcggtaccacgaccgggtcatcttcagcccccacccccagcactgtgcagacgaccaccaccagtgcctggaccccaacgccgaccccactctccacacccagcatcatcaggaccacaggcctgaggccctacccttcctctgtgcttatctgctgtgtcctgaacgacacctactacgcaccaggtgaggaggtgtacaacggcacatacggagacacctgttatttcgtcaactgctcactgagctgtacgttggagttctataactggtcctgcccatccacgccctccccaacacccacgccctccaagtcgacgcccacgccttccaagccatcgtccacgccctccaagccgacgcccggcaccaagccccccgagtgcccagactttgatcctcccagacaggagaacgagacttggtggctgtgcgactgcttcatggccacgtgcaagtacaacaacacggtggagatcgtgaaggtggagtgtgagccgccgcccatgcccacctgctccaacggcctccaacccgtgcgcgtcgaggaccccgacggctgctgctggcactgggagtgcgactgctactgcacgggctggggcgacccgcactatgtcaccttcgacggactctactacagctaccagggcaactgcacctacgtgctggtggaggagatcagcccctccgtggacaacttcggagtttacatcgacaactaccactgcgatcccaacgacaaggtgtcctgtccccgcaccctcatcgtgcgccacgagacccaggaggtgctgatcaagaccgtgcatatgatgcccatgcaggtgcaggtgcaggtgaacaggcaggcggtggcactgccctacaagaagtacgggctggaggtgtaccagtctggcatcaactacgtggtggacatccccgagctgggtgtcctcgtctcctacaatggcctgtccttctccgtcaggctgccctaccaccggtttggcaacaacaccaagggccagtgtggcacctgcaccaacaccacctccgacgactgcattctgcccagcggggagatcgtctccaactgtgaggctgcggctgaccagtggctggtgaacgacccctccaagccacactgcccccacagcagctccacgaccaagcgcccggccgtcactgtgcccgggggcggtaaaacgaccccacacaaggactgcaccccatctcccctctgccagctcatcaaggacagcctgtttgcccagtgccacgcactggtgcccccgcagcactactacgatgcctgcgtgttcgacagctgcttcatgccgggctcgagcctggagtgcgccagtctgcaggcctacgcagccctctgtgcccagcagaacatctgcctcgactggcggaaccacacgcatggggcctgcttggtggagtgcccatctcacagggagtaccaggcctgtggccctgcagaagagcccacgtgcaaatccagctcctcccagcagaacaacacagtcctggtggaaggctgcttctgtcctgagggcaccatgaactacgctcctggctttgatgtctgcgtgaagacctgcggctgtgtgggacctgacaatgtgcccagagagtttggggagcacttcgagttcgactgcaagaactgtgtctgcctggagggtggaagtggcatcatctgccaacccaagaggtgcagccagaagcccgttacccactgcgtggaagacggcacctacctcgccacggaggtcaaccctgccgacacctgctgcaacattaccgtctgcaagtgcaacaccagcctgtgcaaagagaagccctccgtgtgcccgctgggattcgaagtgaagagcaagatggtgcctggaaggtgctgtcccttctactggtgtgagtccaagggggtgtgtgttcacgggaatgctgagtaccagcccggttctccagtttattcctccaagtgccaggactgcgtgtgcacggacaaggtggacaacaacaccctgctcaacgtcatcgcctgcacccacgtgccctgcaacacctcctgcagccctggcttcgaactcatggaggcccccggggagtgctgtaagaagtgtgaacagacgcactgtatcatcaaacggcccgacaaccagcacgtcatcctgaagcccggggacttcaagagcgacccgaagaacaactgcacattcttcagctgcgtgaagatccacaaccagctcatctcgtccgtctccaacatcacctgccccaactttgatgccagcatttgcatcccgggctccatcacattcatgcccaatggatgctgcaagacctgcacccctcgcaatgagaccagggtgccctgctccaccgtccccgtcaccacggaggtttcgtacgccggctgcaccaagaccgtcctcatgaatcattgctccgggtcctgcgggacatttgtcatgtactcggccaaggcccaggccctggaccacagctgctcctgctgcaaagaggagaaaaccagccagcgtgaggtggtcctgagctgccccaatggcggctcgctgacacacacctacacccacatcgagagctgccagtgccaggacaccgtctgcgggctccccaccggcacctcccgccgggcccggcgctcccctaggcatctggggagcgggtgagcggggtgggcacagcccccttcactgccctcgacagctttacctcccccggaccctctgagcctcctaagctcggcttcctctcttcagatatttattgtctgagtctttgttcagtccttgctttccaataataaactcagggggacatgc

SEQ ID NO: 696 - DNA, 3457 bp, Homo sapiens
cctccacctcccgggttcaagcgattctcctgcctcagcctcccgagtagctgagactacaggcacgcgccaccacgcccagctaatttttgtatctttagtagagacgggctttcaccatgttggccaggatggtctcgatgtcttaacgtcgtgatccggccgcctcggcctcccaagtgctgggattacaggcgttagccactgcgcccggccccagccaggcagttttaatcgagcgctcacaaccactgagacgcagcgaagcacccaccataatatcccaggaggccgaccgccggttcagactttttcttttctttaatccccgtccaagggatccgccctcaccccccaccccagccaccccaattccctattccctccccttggacggcgccggggaaaacaagctgctcgagctttatttcttcggtgcaaccaactcagaatgaattcctccgcccctgcgtgctcagtgagtcggcaccctagcagtgaactgcatttaaaacctcaggaattgagcgaactctcccagtggctctcctcaccgggatccccttccacgcctcctccccgtgccgcgcctcagtccgcactgctcattggccgcgtgcctgccaatccgatgcacgtcggctagggcaaagaccgcgaaaaagcgcgtacacctggctctgggagcgcgcgcctaacgccagccagcagcaggaggcgcgcgaggcaccacggcctggcggccgagagtcagggaggaacctcatttacataacggccgcccctctgtctcctggcgggggccggagtcccgcccctcgtccaacttgaaatctgttgggtcacgggccagtcactccgacctaggcaagcctgtggtggagctggaagagtttgtgagggcggtcccgggagcggattgggtctgggagttcccagaggcggctataagaaccgggaactgggcgcggggagctgagttgctggtagtgcccgtggtgcttggttcgaggtggccgttagttgactccgcggagttcatctccctggttttcccgtcctaacgtcgctcgcctttcagtcaggatgtctgcccgtggcccggctatcggcatcgacctgggcaccacctattcgtgcgtcggggtcttccaacatggcaaggtggagatcatcgccaacgaccagggcaatcgcaccacccccagctacgtggccttcacggacaccgagcgcctcatcggcgacgccgccaagaaccaggtggccatgaaccccaccaacaccatcttcgacgccaagaggctgattggacggaaattcgaggatgccacagtgcagtcggatatgaaacactggccgttccgggtggtgagcgagggaggcaagcccaaagtgcaagtagagtacaagggggagaccaagaccttcttcccagaggagatatcctccatggtcctcacgaagatgaaggagatcgcggaagcctacctggggggcaaggtgcacagcgcggtcataacggtcccggcctatttcaacgactcgcagcgccaggccaccaaggacgcaggcaccatcacggggctcaatgtgctgcgcatcatcaacgagcccacggcggcggccatcgcctacggcctggacaagaagggctgcgcgggcggcgagaagaacgtgctcatctttgacctgggcggtggcactttcgacgtgtccatcctgaccatcgaggatggcatcttcgaggtgaagtccacggccggcgatacccacctgggcggtgaggacttcgacaaccgcatggtgagccacctggcggaggagttcaagcgcaagcacaagaaggacattgggcccaacaagcgcgccgtgaggcggctgcgcaccgcttgcgagcgcgccaagcgcaccctgagctcgtccacgcaggcgagcatcgagatcgactcgctctacgagggcgtggacttctatacgtccatcacgcgcgcccgcttcgaggagctcaatgccgacctctttcgcgggaccctggagccggtggagaaggcgctgcgcgacgccaagctggacaagggccagatccaggagatcgtgctggtgggcggctccactcgtatccccaagatccagaagctgctgcaggatttcttcaacggcaaggagctgaacaagagcatcaaccccgacgaggcggtggcctatggcgccgcggtgcaggcggccatcctcatcggcgacaaatcagagaatgtgcaggacctgctgctactcgacgtgaccccgttgtcgctgggcatcgagacagctggcggtgtcatgaccccactcatcaagaggaacaccacgatccccaccaagcagacgcagaccttcaccacctactcggacaaccagagcagcgtactggtgcaggtatacgagggcgaacgggccatgaccaaggacaataacctgctgggcaagttcgacctgaccgggattccccctgcgcctcgcggggtcccccaaatcgaggttaccttcgacattgacgccaatggcatccttaacgttaccgccgccgacaagagcaccggtaaggaaaacaaaatcaccatcaccaatgacaaaggtcgtctgagcaaggacgacattgaccggatggtgcaggaggcggagcggtacaaatcggaagatgaggcgaatcgcgaccgagtcgcggccaaaaacgccctggagtcctatacctacaacatcaagcagacggtggaagacgagaaactgaggggcaagattagcgagcaggacaaaaacaagatcctcgacaagtgtcaggaggtgatcaactggctcgaccgaaaccagatggcagagaaagatgagtatgaacacaagcagaaagagctcgaaagagtttgcaaccccatcatcagcaaactttaccaaggtggtcctggcggcggcagcggcggcggcggttcaggagcctccgggggacccaccatcgaagaagtggactaagcttgcactcaagtcagcgtaaacctctttgcctttctctctctctcttttttttttgtttgtttctttgaaatgtccttgtgccaagtacgagatctattgttggaagtctttggtatatgcaaatgaaaggagaggtgcaacaacttagtttaattataaaagttccaaagtttgttttttaaaaacattattcgaggtttctctttaatgcattttgcgtgtttgctgacttgagcatttttgattagttcgtgcatggagatttgtttgagatgagaaaccttaagtttgcacacctgttctgtagaagcttggaaacagtaaaatatataggagcttaaattgtttatttttatgtactactttaaaactaaactgaacattgcagtaatgttaaggacaggtatactttttgcaaacaaatgcataaatgcaaatgtaaagtaaa

SEQ ID NO: 697 - DNA, 3457 bp, Homo sapiens; identical to SEQ ID NO: 696

SEQ ID NO: 698 - DNA, 3775 bp, Homo sapiens
cattcataagactcagagctacggccacggcagggacacgcggaaccaagacttggaaacttgattgttgtggttcttcttgggggttatgaaatttcattaatcttttttttttccggggagaaagtttttggaaagattcttccagatatttcttcattttcttttggaggaccgacttactttttttggtcttctttattactcccctccccccgtgggacccgccggacgcgtggaggagaccgtagctgaagctgattctgtacagcgggacagcgctttctgcccctgggggagcaacccctccctcgcccctgggtcctacggagcctgcactttcaagaggtacagcggcatcctgtgggggcctgggcaccgcaggaagactgcacagaaactttgccattgttggaacgggacgttgctccttccccgagcttccccggacagcgtactttgaggactcgctcagctcaccggggactcccacggctcaccccggacttgcaccttacttccccaacccggccatagccttggcttcccggcgacctcagcgtggtcacaggggcccccctgtgcccagggaaatgtttcaggctttccccggagactacgactccggctcccggtgcagctcctcaccctctgccgagtctcaatatctgtcttcggtggactccttcggcagtccacccaccgccgcggcctcccaggagtgcgccggtctcggggaaatgcccggttccttcgtgcccacggtcaccgcgatcacaaccagccaggacctccagtggcttgtgcaacccaccctcatctcttccatggcccagtcccaggggcagccactggcctcccagcccccggtcgtcgacccctacgacatgccgggaaccagctactccacaccaggcatgagtggctacagcagtggcggagcgagtggcagtggtgggccttccaccagcggaactaccagtgggcctgggcctgcccgcccagcccgagcccggcctaggagaccccgagaggagacgctcaccccagaggaagaggagaagcgaagggtgcgccgggaacgaaataaactagcagcagctaaatgcaggaaccggcggagggagctgaccgaccgactccaggcggagacagatcagttggaggaagaaaaagcagagctggagtcggagatcgccgagctccaaaaggagaaggaacgtctggagtttgtgctggtggcccacaaaccgggctgcaagatcccctacgaagaggggcccgggccgggcccgctggcggaggtgagagatttgccgggctcagcaccggctaaggaagatggcttcagctggctgctgccgcccccgccaccaccgcccctgcccttccagaccagccaagacgcaccccccaacctgacggcttctctctttacacacagtgaagttcaagtcctcggcgaccccttccccgttgttaacccttcgtacacttcttcgtttgtcctcacctgcccggaggtctccgcgttcgccggcgcccaacgcaccagcggcagtgaccagccttccgatcccctgaactcgccctccctcctcgctcggtgaactctttagacacacaaaacaaacaaacacatgggggagagagacttggaagaggaggaggaggaggagaaggaggagagagaggggaagagacaaagtgggtgtgtggcctccctggctcctccgtctgaccctctgcggccactgcgccactgccatcggacaggaggattccttgtgttttgtcctgcctcttgtttctgtgccccggcgaggccggagagctggtgactttggggacagggggtgggaaggggatggacacccccagctgactgttggctctctgacgtcaacccaagctctggggatgggtggggaggggggcgggtgacgcccaccttcgggcagtcctgtgtgaggatgaagggacgggggtgggaggtaggctgtggggtgggctggagtcctctccagagaggctcaacaaggaaaaatgccactccctacccaatgtctcccacacccaccctttttttggggtgcccaggttggtttcccctgcactcccgaccttagcttattgatcccacatttccatggtgtgagatcctctttactctgggcagaagtgagcccccccttaaagggaattcgatgcccccctagaataatctcatccccccacccgacttcttttgaaatgtgaacgtccttccttgactgtctagccactccctcccagaaaaactggctctgattggaatttctggcctcctaaggctccccaccccgaaatcagcccccagccttgtttctgatgacagtgttatcccaagaccctgccccctgccagccgaccctcctggccttcctcgttgggccgctctgatttcaggcagcaggggctgctgtgatgccgtcctgctggagtgatttatactgtgaaatgagttggccagattgtggggtgcagctgggtggggcagcacacctctggggggataatgtccccactcccgaaagcctttcctcggtctcccttccgtccatcccccttcttcctcccctcaacagtgagttagactcaagggggtgacagaaccgagaagggggtgacagtcctccatccacgtggcctctctctctctcctcaggaccctcagccctggcctttttctttaaggtcccccgaccaatccccagcctaggacgccaacttctcccaccccttggcccctcacatcctctccaggaaggcagtgaggggctgtgacatttttccggagaagatttcagagctgaggctttggtacccccaaacccccaatatttttggactggcagactcaaggggctggaatctcatgattccatgcccgagtccgcccatccctgaccatggttttggctctcccaccccgccgttccctgcgcttcatctcatgaggatttctttatgaggcaaatttatattttttaatatcggggggtggaccacgccgccctccatccgtgctgcatgaaaaacattccacgtgccccttgtcgcgcgtctcccatcctgatcccagacccattccttagctatttatccctttcctggtttccgaaaggcaattatatctattatgtataagtaaatatattatatatggatgtgtgtgtgtgcgtgcgcgtgagtgtgtgagcgcttctgcagcctcggcctaggtcacgttggccctcaaagcgagccgttgaattggaaactgcttctagaaactctggctcagcctgtctcgggctgacccttttctgatcgtctcggcccctctgattgttcccgatggtctctctccctctgtcttttctcctccgcctgtgtccatctgaccgttttcacttgtctcctttctgactgtccctgccaatgctccagctgtcgtctgactctgggttcgttggggacatgagattttattttttgtgagtgagactgagggatcgtagatttttacaatctgtatctttgacaattctgggtgcgagtgtgagagtgtgagcagggcttgctcctgccaaccacaattcaatgaatccccgacccccctaccccatgctgtacttgtggttctctttttgtattttgcatctgaccccggggggctgggacagattggcaatgggccgtcccctctccccttggttctgcactgttgccaataaaaagctcttaaaaacgc

SEQ ID NO: 699 - DNA, 2518 bp, Homo sapiens
ccagcagtggctgcaccatgcacgtgaacggcaaagtggcgctggtgaccggcgcggctcagggcataggcagagcctttgcagaggcgctgctgcttaagggcgccaaggtagcgctggtggattggaatcttgaagcaggtgtacagtgtaaagctgccctgcatgagcaatttgaacctcagaagactctgttcatccagtgcgatgtggctgaccagcaacaactgagagacacttttagaaaagttgtagaccactttggaagactggacattttggtcaataatgctggagtgaataatgagaaaaactgggaaaaaactctgcaaattaatttggtttctgttatcagtggaacctatcttggtttggattacatgagtaagcaaaatggaggtgaaggcggcatcattatcaatatgtcatctttagcaggactcatgcccgttgcacagcagccggtttattgtgcttcaaagcatggcatagttggattcacacgctcagcagcgttggctgctaatcttatgaacagtggtgtgagactgaatgccatttgtccaggctttgttaacacagccatccttgaatcaattgaaaaagaagaaaacatgggacaatatatagaatataaggatcatatcaaggatatgattaaatactatggaattttggacccaccattgattgccaatggattgataacactcattgaagatgatgctttaaatggtgctattatgaagatcacaacttctaagggaattcattttcaagactatgatacaactccatttcaagcaaaaacccaatgaacagcttatgtgttagccatagctgaaaataagcacaaatagcttatattcagatcctatcttcatttgaatatagcttttaaatgaaatgttacagtttgaagttttccttcatgcacttggtgataaacgttttctaaatttttagttaagtatatggataaaaagttatgaactattaaaaatgtgatgtggaccaaaggctaggttgtaatcttgatagtctaaaaaatgatcaaaacaaatgattttcaaggaatattcaatattctgcctttcagaaagtgtatttatatctgtgcttcataaatattaatgttcttcagaacatcattttaaaggagatacttgaattgttatttaaatcaaaccagatgtaaaacactcacatacaagttcatactttaaaagaggaaagctacttaacaatgacaaatatttcacaataataatttttacttatataccatctttcaactgaacatttcagttcttccaagagcttcttagagtagtatattttgggggcagtcaaggaataaactacagtgtaaacatatcccagatgaaaactgctgtatggaaaaatgacagaaagtaactgattgacactgttgattcacagttcagcctcctatctgggaaagacatttctttcctctgctcactttaagaacttttaccgactccaaaaatctcaggaattaaacttttaacagttacagcaataaagaatagttagtactccaaaaatattatatttaagatgctcaacaagaaaaaaatgcaaatgtaatatttttttcaaattacttctttattgacttgtccaaatttcaaaagtgcctacccttcaataaaacttttttattctgatctccataaattacttagtcttctatgtatagctatcaaggaaataaaaccaattttgccacagccacaactgtaaatgtttttgtacccatgctgaaactcataacaacacagacataaaaatagctgtgaggttttgctttttttgttgtcagctatcttaagaatcattaaatacacctgctttgggtaaaactctttgcaagcagtaattaacactagtaacagtgaaagcacaagatttccaaatcagtcgttttctcaaaaaaatatcgtataagtgactcatcctgtctgctaactccagacctcccagcttgaagccaaatctttccatgtgagattgatatggatttcctagaagtactggaatgttgtcatatcttgccctattttaattctgctatagaaaacaattgccttcacttttaaggagtaatttgaatattaataactctggtctagattttcatataatgtattaaagacaaagtagtgaacatcaatgaacatctgatagagataaactgtaatcaggcataagcttgtttgtatgttctggcagtgactaatcagtaaatgatgtcggtttgcccagtatcacttatcttctgtatttttcctctgtcgtgtaaatagtataaccttttcatttatggacaattttttggactagtagccttcaatatacattctgctttgaattaattttttcaaatcaataaattatgtagacatttaaaatcaaatatcaagtagaattgaaaaatgtgagttacataagttaaaaacttactttaaatcttaccttctataggtagctc

SEQ ID NO: 700 - DNA, 489 bp, Homo sapiens
agagccgcaggtcagtcgtgaagagggagctctattgccaccatgagtttctccggcaagtaccaactgcagagccaggaaaactttgaagccttcatgaaggcaatcggtctgccggaagagctcatccagaaggggaaggatatcaagggggtgtcggaaatcgtgcagaatgggaagcacttcaagttcaccatcaccgctgggtccaaagtgatccaaaacgaattcacggtgggggaggaatgtgagctggagacaatgacaggggagaaagtcaagacagtggttcagttggaaggtgacaataaactggtgacagctttcaaaaacatcaagtctgtgaccgaactcaacggcgacataatcaccaataccatgacattgggtgacattgtcttcaagagaatcagcaagagaatttaaacaagtctgcatttcatattattttagtgtgtaaaattaatgtaataaagtgaactttgtttt

SEQ ID NO: 701 - DNA, 1763 bp, Homo sapiens
cccgggacggcagcaggtgggctgcacacggactctgggacaagtcgagctgaaaaccgcggagcaggggtggggtggagacgcccgcgacgccaaggctggggtcccggaacacgctgggaggagggtggaaggcaacctcggggaaactgggaaaggcggcctggacttcgggaacaccgcgtacctgcgggggcacagcccacccgagcgaacgggctccaaagggaaggtcccgcggtgcccaccggcagagctcagggggtggtgcgcccggcccttctgcggcgcacagcccagcccaggaacgcgggcggtgcggactcagcgggccgggtgcaggcgcggagctgggcctctgcgcccggcccgacctccgtctataaatagagcagccagttgcagggctccattctgctttccaactgcctgactgcttgttcgtctcactggtgtgagctccagcatcccctttgctcgaaatggaccccaactgctcttgcgccactggtaagggaagctctgcgccctggaatccccatttcccagccctattacagagggtctctgggtttcaggaagtcgcattttaagttctgagcgacggggactccagtacttcgttagatgctttcttcctgatcacgcccctgagagcattgccctcatccctgggcctctacgtcagagttaagaatactgaggctcaaggctgaactgctccacatcacccagttggtcatgggcctgctggctgggccccagtgctctgtccaggctctgagcaatcagtgtggttgggggtgctggaaacattgactcttcagagttcaggacagaaggttctggctcgcagtctcaatattcctgggttgtatgtgcacgtgggaccttcctggtgcggtaaaacaggagggtccttgccccttccccagcgttagtgagaggacatggggcttctgttcctctgtcctgagtgggaaaggagctctgagggctggccctgcacagaggagggggcactggagactcactgacccactgctgtaccttctgcatctcactcactgcccactgcgttttcctcttccttgtaggtggctcctgcacgtgcgccggctcctgcaagtgcaaagagtgcaaatgcacctcctgcaagaagagtgagtgcggggccatctccaggaatctggggctgtggctcaggttgggagggaactcaaggctggccctgagtgcatccttctggggaactgggctttctttgccctcattgcccgtgtcattccctctccaggctttctgccctaaattcagatggggcaggacagcatttttctcgtgggacacaaaccccaactgtaccccctatggtttcagaacagagctgtgccagacgaaaaaaagcatcctctgggtctgggttctgagctcgagccaggcttgctattagggcagggaggtgcccggtcaagtctactgccacctctcactctccccttcttccccaggctgctgttcctgctgccccgtgggctgtgccaagtgtgcccagggctgcgtctgcaaaggggcatcggagaagtgcagctgctgtgcctgatgtgggaacagctcttctcccagatgtaaatagaacaacctgcacaacctggatttttttaaaaatacaacactgagccatttgctgcatttctttttatactaaatatgtgactgacaataaaaacaattttgactttaatcttactccctgttcttct

SEQ ID NO: 702 - DNA, 1044 bp, Homo sapiens
tgctgctctcctcccgctccgtcctcctcgcctgccaccggtgcacccagtccgctcacccagcccagtccgtccggtcctcaccgcctgccggccggcccaccccccaccgcaggccatggacgccatcaagaagaagatgcagatgctgaagctggacaaggagaacgccatcgaccgcgccgagcaggccgaagccgacaagaagcaagctgaggaccgctgcaagcagctggaggaggagcagcaggccctccagaagaagctgaaggggacagaggatgaggtggaaaagtattctgaatccgtgaaggaggcccaggagaaactggagcaggccgagaagaaggccactgatgctgaggcagatgtggcctccctgaaccgccgcattcagctggttgaggaggagctggaccgggcccaggagcgcctggctacagccctgcagaagctggaggaggccgagaaggcggctgatgagagcgagagaggaatgaaggtcatcgaaaaccgggccatgaaggatgaggagaagatggaactgcaggagatgcagctgaaggaggccaagcacatcgctgaggattcagaccgcaaatatgaagaggtggccaggaagctggtgatcctggaaggagagctggagcgctcggaggagagggctgaggtggccgagagccgagccagacagctggaggaggaacttcgaaccatggaccaggccctcaagtccctgatggcctcagaggaggagtattccaccaaagaagataaatatgaagaggagatcaaactgttggaggagaagctgaaggaggctgagacccgagcagagtttgccgagaggtctgtggcaaagttggagaaaaccatcgatgacctagaagagaccttggccagtgccaaggaggagaacgtcgagattcaccagaccttggaccagaccctgctggaactcaacaacctgtgagggccagccccacccccagccaggctatggttgccaccccaacccaataaaactgatgttactagcctctc

SEQ ID NO: 703 - DNA, 1486 bp, Homo sapiens
gaattccaaatgcactcaagcagagaagaaatccacaagtactcaccagcctcctggtctgcagagaagacagaatcaatatgagcacagcaggaaaagtaatcaaatgcaaagcagctgtgctatgggagttaaagaaacccttttccattgaggaggtagaggttgcacctcctaaggctcatgaagttcgcattaagatggtggctgcaggaatctgtcgttcagatgagcatgtggttagtggcaacctggtgaccccccttcctgtgattttaggccatgaggcagccggcatcgtggaaagtgttggagaaggggtgactacagtcaaaccaggtgataaagtcatcccgctctttactcctcagtgtggaaaatgcagaatttgtaaaaacccagaaagcaactactgcttgaaaaatgatctaggcaatcctcgggggaccctgcaggatggcaccaggaggttcacctgcagcgggaagcccatccaccacttcgtcggcgtcagcaccttctcccagtacacagtggtggatgagaatgcagtggccaaaattgatgcagcctcgcccctggagaaagtctgcctcattggctgtggattttcgactggttatgggtctgcagtcaaagttgccaaggtcaccccagggtctacctgtgctgtgtttggcctgggaggggtcggcctatctgttgttatgggctgtaaagcagctggagcagccagaatcattgctgtggacatcaacaaggacaaatttgcaaaggctaaagagttgggggccactgaatgcatcaaccctcaagactacaagaaacccattcaggaagtgctaaaggaaatgactgatggaggtgtggatttttcgtttgaagtcatcggtcggcttgacaccatgatggcttccctgttatgttgtcatgaggcatgtggcacaagtgtcattgtaggggtacctcctgattcccagaacctctcaataaaccctatgctgctactgactggacgcacgtggaaaggagctatttttggaggctttaagagtaaagaatctgtcccgaaacttgtggctgactttatggctaagaagttttcactggatgcattaataacaaatattttaccttttgaaaaaataaatgaaggatttgacctgcttcgctctggaaagagtatccgtaccgtcctgacgttttgaaacaatacagatgccttcccttgtagcagttttcagcctcctctaccctacatgatctggagcaacagctaggaaatatcattaattctgctcttcagagatgttaaaaataaattacacgtgggagctttccaaagaaatggaaattgatgggaaattatttgtcaagcaaatgtttaaaatccaaatgagaactaaataaagtgttgaacatcaactggggaattgaagccaataaaccttccttcttaaccattcaaaaaaaaaaaaaggaattc

SEQ ID NO: 704 - DNA, 2088 bp, Homo sapiens
  misc_feature (1)...(2088): n=a,t,g or c
gtatactcattaccaaaaataacaatatctgcatttcattgttttaactttgttttctttcttttcttttagtgttcctctgaacaacagggagaatatctctgatcccacctcaccattgagaaccagatttgtgtaccatttgtctgacctgtaagatatatttttttccatagtaatatagatgtggaagttaatagcttttaattttaaccttgttagtaagaatgtttttaaaaatatgttggagtataaacatttacaaacataatctgaacttttgaatacattaattcctatgttaattattaggtatcataaattcataaaactttgtcacagataaaatttagctatacattttttctaaagaaaaaatcattggcattcatagaaaggccaatttctcttaatagttcaataagtgnatttgatcttataaaaaggcaggtgtttctttggaaatgacagactccaacatcaatttttttaaaaattctccctttcttgtcactataaataacttgtttagacagatatacagttgggaataagcctaacacagtagaaattgctgtatggtgtagataaaacaatcatattatcatatcattaattatattgcttactttcaactaatatatattaaagattggaaaatcccataagctattctgtattgtagagctgcttatgtctgaaaggagtcatcccttgctgtcatgtcagagctgcaagaactaattgattttggattgaaatgtgtagtcacattttgagacagcatttgaggggattgtctaatacatatatttgcttttcagctgtaaaaaatgtgatcctacagaagtggagctggataatcagatagttactgctacccagagcaatatctgtgatgaagacagtgctacagagacctgctacacttatgacagaaacaagtgctacacagctgtggtcccactcgtatatggtggtgagaccaaaatggtggaaacagccttaaccccagatgcctgctatcctgactaatttaagtcattgctgactgcatagctctttttcttgagaggctctccattttgattcagaaagttagcatatttattaccaatgaatttgaaaccagggcttttttttttttttgggtgatgtaaaaccaactccctgccaccaaaataattaaaatagtcacattgttatctttattaggtaatcacttcttaattatatgttcatactaagtatcaaaatcttccaattatcatgctcacctgaaagaggtatgctctcttaggaatacagtttctagcattaaacaaataaacaaggggagaaaataaaactcaaggagtgaaaatcaggaggtgtaataaaatgttcctcgcattcccccccgcttttttttttttttttgactttgccttggagagccagagcttccgcattttctttactattctttttaaaaaaagtttcactgtgtagagaacatatatgcataaacataggtcaattatatgtctccattagaaaaataataattggaaaacatgttctagaactagttacaaaaataatttaaggtgaaatctctaatatttataaaagtagcaaaataaatgcataattaaaatatatttggacataacagacttggaagcagatgatacagacttctttttttcataatcaggttagtgtaagaaattgccatttgaaacaatccattttgtaactgaaccttatgaaatatatgtatttcatggtacgtattctctagcacagtctgagcaattaaatagattcataagcatatacctgtgtgaaataaattgttggaaaaaagtttccttatgttaactttctttacgtaagttaacttgttattgatgaatggtttgtaagtatgatgtaatgaagcattaatcacagaactaatacatgtacatatttgaggtggctttgccattttatacccataattaaataaaagggcaaaatcccccctgataaataccatgtttatcatggcacataaaactttatggcagtttccaaggccaattgacatatatatttaaa

SEQ ID NO: 705 - DNA, 2088 bp, Homo sapiens; identical to SEQ ID NO: 704
  misc_feature (1)...(2088): n=a,t,g or c

SEQ ID NO: 706 - DNA, 1450 bp, Homo sapiens
gatgcacttgagcagggaagaaatccacaaggactcaccagtctcctggtctgcagagaagacagaatcaacatgagcacagcaggaaaagtaatcaaatgcaaagcagctgtgctatgggagttaaagaaacccttttccattgaggaggtggaggttgcacctcctaaggcccatgaagttcgtattaagatggtggctgtaggaatctgtggcacagatgaccacgtggttagtggtaccatggtgaccccacttcctgtgattttaggccatgaggcagccggcatcgtggagagtgttggagaaggggtgactacagtcaaaccaggtgataaagtcatcccactcgctattcctcagtgtggaaaatgcagaatttgtaaaaacccggagagcaactactgcttgaaaaacgatgtaagcaatcctcaggggaccctgcaggatggcaccagcaggttcacctgcaggaggaagcccatccaccacttccttggcatcagcaccttctcacagtacacagtggtggatgaaaatgcagtagccaaaattgatgcagcctcgcctctagagaaagtctgtctcattggctgtggattttcaactggttatgggtctgcagtcaatgttgccaaggtcaccccaggctctacctgtgctgtgtttggcctgggaggggtcggcctatctgctattatgggctgtaaagcagctggggcagccagaatcattgcggtggacatcaacaaggacaaatttgcaaaggccaaagagttgggtgccactgaatgcatcaaccctcaagactacaagaaacccatccaggaggtgctaaaggaaatgactgatggaggtgtggatttttcatttgaagtcatcggtcggcttgacaccatgatggcttccctgttatgttgtcatgaggcatgtggcacaagtgtcatcgtaggggtacctcctgattcccaaaacctctcaatgaaccctatgctgctactgactggacgtacctggaagggagctattcttggtggctttaaaagtaaagaatgtgtcccaaaacttgtggctgattttatggctaagaagttttcattggatgcattaataacccatgttttaccttttgaaaaaataaatgaaggatttgacctgcttcactctgggaaaagtatccgtaccattctgatgttttgagacaatacagatgttttcccttgtggcagtcttcagcctcctctaccctacatgatctggagcaacagctgggaaatatcattaattctgctcatcacagattttatcaataaattacatttgggggctttccaaagaaatggaaattgatgtaaaattatttttcaagcaaatgtttaaaatccaaatgagaactaaataaagtgttgaacatcagctggggaattgaagccaataaaccttccttctt

SEQ ID NO: 707 - DNA, 1360 bp, Homo sapiens
ccgccgccatgcccttctccaacagccacaacgcactgaagctgcgcttcccggccgaggacgagttccccgacctgagcgcccacaacaaccacatggccaaggtgctgacccccgagctgtacgcggagctgcgcgccaagagcacgccgagcggcttcacgctggacgacgtcatccagacaggcgtggacaacccgggccacccgtacatcatgaccgtgggctgcgtggcgggcggcgaggagtcctacgaagtgttcaaggatctcttcgaccccatcatcgaggaccggcacggcggctacaagcccagcgatgagcacaagaccgacctcaaccccgacaacctgcagggcggcgacgacctggaccccaactacgtgctgagctccggggtgcgcacgggccgcagcatccgtggcttctgcctccccccgcactgcagccgcggggagcgccgcgccatcgagaagctcgcggtggaagccctgtccagcctggacggcgacctggcgggccgatactacgcgctcaagagcatgacggaggcggagcagcagcagctcatcgacgaccacttcctcttcgacaagcccgtgtcgcccctgctgctggcctcgggcatggcccgcgactggcccgacgcccgcggtatctggcacaatgacaataagaccttcctggtgtgggtcaacgaggaggaccacctgcgggtcatctccatgcagaaggggggcaacatgaaggaggtgttcacccgcttctgcaccggcctcacccagattgaaactctcttcaagtctaaggactatgagttcatgtggaaccctcacctgggctacatcctcacctgcccatccaacctgggcaccgggctgcgggcaggtgtgcatatcaagctgcccaacctgggcaagcatgagaagttctcggaggtgcttaagcggctgcgacttcagaagcgaggcacaggcggtgtggacacggctgcggtgggcggggtcttcgacgtctccaacgctgaccgcctgggcttctcagaggtggagctggtgcagatggtggtggacggagtgaagctgctcatcgagatggagcagcggctggagcagggccaggccatcgacgacctcatgcctgcccagaaatgaagcccggcccacacccgacaccagccctcgtgcttcctaacttattgcctgggcagtgcccacatgcacccctgatgttgcccgtctggcgagcccttagccttgctgtagaaggactgtccgtcacccttggtagagtttatttttttgatggctaagatactgctgatgctgaaataaactagggttttggcctgcaaaaaaaa

SEQ ID NO: 708 - DNA, 1633 bp, Homo sapiens
cagaatctccggcagtttttgtacctcaagaagtaagtggaacacctttccctgtcatagttattttcatccagacatctggtggaagcatcagattccttacagatataagagaggcatcatttaaaaggtagaacaggatcgacaaacaaggatttatgtcaggatctctcagcctctgtgttaccgagggcatttctaacagtcttcttactacggcctccgccgaccgcgcgctcgccccgccgctcctgctgcagccccagggcccctcgccgccgccaccatggacgccatcaagaagaagatgcagatgctgaagctcgacaaggagaacgccttggatcgagctgagcaggcggaggccgacaagaaggcggcggaagacaggagcaagcagctggaagatgagctggtgtcactgcaaaagaaactcaagggcaccgaagatgaactggacaaatactctgaggctctcaaagatgcccaggagaagctggagctggcagagaaaaaggccaccgatgctgaagccgacgtagcttctctgaacagacgcatccagctggttgaggaagagttggatcgtgcccaggagcgtctggcaacagctttgcagaagctggaggaagctgagaaggcagcagatgagagtgagagaggcatgaaagtcattgagagtcgagcccaaaaagatgaagaaaaaatggaaattcaggagatccaactgaaagaggcaaagcacattgctgaagatgccgaccgcaaatatgaagaggtggcccgtaagctggtcatcattgagagcgacctggaacgtgcagaggagcgggctgagctctcagaaggccaagtccgacagctggaagaacaattaagaataatggatcagaccttgaaagcattaatggctgcagaggataagtactcgcagaaggaagacagatatgaggaagagatcaaggtcctttccgacaagctgaaggaggctgagactcgggctgagtttgcggagaggtcagtaactaaattggagaaaagcattgatgacttagaagagaaagtggctcatgccaaagaagaaaaccttagtatgcatcagatgctggatcagactttactggagttaaacaacatgtgaaaacctccttagctgcgaccacattctttcattttgttttgttttgttttgtttttaaacacctgcttaccccttaaatgcaatttatttacttttaccactgtcacagaaacatccacaagataccagctaggtcagggggtggggaaaacacatacaaaaagcaagcccatgtcagggcgatcctggttcaaatgtgccatttcccgggttgatgctgccacactttgtagagagtttagcaacacagtgtgcttagtcagcgtaggaatcctcactaaagcaggagaagttccattcaaagtgccaatgatagagtcaacaaggaaggttaatgttggaaacacaatcaggtgtggattggtgctactttgaacaaaaggtccccctgtggtcttttgttcaacattgtacaatgtagaactctgtccaacactaatttattttgtcttgagttttactacaagatgagactatggatcccgcatgcct

SEQ ID NO: 709 - DNA, 6378 bp, Homo sapiens
cccattactgttggagctacagggagagaaacaggaggagactgcaagagatcatttgggaaggccgtgggcacgctctttactccatgtgtgggacattcattgcggaataacatcggaggagaagtttcccagagctatggggacttcccatccggcgttcctggtcttaggctgtcttctcacagggctgagcctaatcctctgccagctttcattaccctctatccttccaaatgaaaatgaaaaggttgtgcagctgaattcatccttttctctgagatgctttggggagagtgaagtgagctggcagtaccccatgtctgaagaagagagctccgatgtggaaatcagaaatgaagaaaacaacagcggcctttttgtgacggtcttggaagtgagcagtgcctcggcggcccacacagggttgtacacttgctattacaaccacactcagacagaagagaatgagcttgaaggcaggcacatttacatctatgtgccagacccagatgtagcctttgtacctctaggaatgacggattatttagtcatcgtggaggatgatgattctgccattataccttgtcgcacaactgatcccgagactcctgtaaccttacacaacagtgagggggtggtacctgcctcctacgacagcagacagggctttaatgggaccttcactgtagggccctatatctgtgaggccaccgtcaaaggaaagaagttccagaccatcccatttaatgtttatgctttaaaagcaacatcagagctggatctagaaatggaagctcttaaaaccgtgtataagtcaggggaaacgattgtggtcacctgtgctgtttttaacaatgaggtggttgaccttcaatggacttaccctggagaagtgaaaggcaaaggcatcacaatgctggaagaaatcaaagtcccatccatcaaattggtgtacactttgacggtccccgaggccacggtgaaagacagtggagattacgaatgtgctgcccgccaggctaccagggaggtcaaagaaatgaagaaagtcactatttctgtccatgagaaaggtttcattgaaatcaaacccaccttcagccagttggaagctgtcaacctgcatgaagtcaaacattttgttgtagaggtgcgggcctacccacctcccaggatatcctggctgaaaaacaatctgactctgattgaaaatctcactgagatcaccactgatgtggaaaagattcaggaaataaggtatcgaagcaaattaaagctgatccgtgctaaggaagaagacagtggccattatactattgtagctcaaaatgaagatgctgtgaagagctatacttttgaactgttaactcaagttccttcatccattctggacttggtcgatgatcaccatggctcaactgggggacagacggtgaggtgcacagctgaaggcacgccgcttcctgatattgagtggatgatatgcaaagatattaagaaatgtaataatgaaacttcctggactattttggccaacaatgtctcaaacatcatcacggagatccactcccgagacaggagtaccgtggagggccgtgtgactttcgccaaagtggaggagaccatcgccgtgcgatgcctggctaagaatctccttggagctgagaaccgagagctgaagctggtggctcccaccctgcgttctgaactcacggtggctgctgcagtcctggtgctgttggtgattgtgatcatctcacttattgtcctggttgtcatttggaaacagaaaccgaggtatgaaattcgctggagggtcattgaatcaatcagcccggatggacatgaatatatttatgtggacccgatgcagctgccttatgactcaagatgggagtttccaagagatggactagtgcttggtcgggtcttggggtctggagcgtttgggaaggtggttgaaggaacagcctatggattaagccggtcccaacctgtcatgaaagttgcagtgaagatgctaaaacccacggccagatccagtgaaaaacaagctctcatgtctgaactgaagataatgactcacctggggccacatttgaacattgtaaacttgctgggagcctgcaccaagtcaggccccatttacatcatcacagagtattgcttctatggagatttggtcaactatttgcataagaatagggatagcttcctgagccaccacccagagaagccaaagaaagagctggatatctttggattgaaccctgctgatgaaagcacacggagctatgttattttatcttttgaaaacaatggtgactacatggacatgaagcaggctgatactacacagtatgtccccatgctagaaaggaaagaggtttctaaatattccgacatccagagatcactctatgatcgtccagcctcatataagaagaaatctatgttagactcagaagtcaaaaacctcctttcagatgataactcagaaggccttactttattggatttgttgagcttcacctatcaagttgcccgaggaatggagtttttggcttcaaaaaattgtgtccaccgtgatctggctgctcgcaacgtcctcctggcacaaggaaaaattgtgaagatctgtgactttggcctggccagagacatcatgcatgattcgaactatgtgtcgaaaggcagtacctttctgcccgtgaagtggatggctcctgagagcatctttgacaacctctacaccacactgagtgatgtctggtcttatggcattctgctctgggagatcttttcccttggtggcaccccttaccccggcatgatggtggattctactttctacaataagatcaagagtgggtaccggatggccaagcctgaccacgctaccagtgaagtctacgagatcatggtgaaatgctggaacagtgagccggagaagagaccctccttttaccacctgagtgagattgtggagaatctgctgcctggacaatataaaaagagttatgaaaaaattcacctggacttcctgaagagtgaccatcctgctgtggcacgcatgcgtgtggactcagacaatgcatacattggtgtcacctacaaaaacgaggaagacaagctgaaggactgggagggtggtctggatgagcagagactgagcgctgacagtggctacatcattcctctgcctgacattgaccctgtccctgaggaggaggacctgggcaagaggaacagacacagctcgcagacctctgaagagagtgccattgagacgggttccagcagttccaccttcatcaagagagaggacgagaccattgaagacatcgacatgatggacgacatcggcatagactcttcagacctggtggaagacagcttcctgtaactggcggattcgaggggttccttccacttctggggccacctctggatcccgttcagaaaaccactttattgcaatgcggaggttgagaggaggacttggttgatgtttaaagagaagttcccagccaagggcctcggggagcgttctaaatatgaatgaatgggatattttgaaatgaactttgtcagtgttgcctctcgcaatgcctcagtagcatctcagtggtgtgtgaagtttggagatagatggataagggaataataggccacagaaggtgaactttgtgcttcaaggacattggtgagagtccaacagacacaatttatactgcgacagaacttcagcattgtaattatgtaaataactctaaccaaggctgtgtttagattgtattaactatcttctttggacttctgaagagaccactcaatccatccatgtacttccctcttgaaacctgatgtcagctgctgttgaactttttaaagaagtgcatgaaaaaccatttttgaaccttaaaaggtactggtactatagcattttgctatcttttttagtgttaagagataaagaataataattaaccaaccttgtttaatagatttgggtcatttagaagcctgacaactcattttcatattgtaatctatgtttataatactactactgttatcagtaatgctaaatgtgtaataatgtaacatgatttccctccagagaaagcacaatttaaaacaatccttactaagtaggtgatgagtttgacagtttttgacatttatattaaataacatgtttctctataaagtatggtaatagctttagtgaattaaatttagttgagcatagagaacaaagtaaaagtagtgttgtccaggaagtcagaatttttaactgtactgaataggttccccaatccatcgtattaaaaaacaattaactgccctctgaaataatgggattagaaacaaacaaaactcttaagtcctaaaagttctcaatgtagaggcataaacctgtgctgaacataacttctcatgtatattacccaatggaaaatataatgatcagcaaaaagactggatttgcagaagttttttttttttttcttcatgcctgatgaaagctttggcaaccccaatatatgtattttttgaatctatgaacctgaaaagggtcagaaggatgcccagacatcagcctccttctttcaccccttaccccaaagagaaagagtttgaaactcgagaccataaagatattctttagtggaggctggatgtgcattagcctggatcctcagttctcaaatgtgtgtggcagccaggatgactagatcctgggtttccatccttgagattctgaagtatgaagtctgagggaaaccagagtctgtatttttctaaactccctggctgttctgatcggccagttttcggaaacactgacttaggtttcaggaagttgccatgggaaacaaataatttgaactttggaacagggttggaattcaaccacgcaggaagcctactatttaaatccttggcttcaggttagtgacatttaatgccatctagctagcaattgcgaccttaatttaactttccagtcttagctgaggctgagaaagctaaagtttggttttgacaggttttccaaaagtaaagatgctacttcccactgtatgggggagattgaactttccccgtctcccgtcttctgcctcccactccataccccgccaaggaaaggcatgtacaaaaattatgcaattcagtgttccaagtctctgtgtaaccagctcagtgttttggtggaaaaaacattttaagttttactgataatttgaggttagatgggaggatgaattgtcacatctatccacactgtcaaacaggttggtgtgggttcattggcattctttgcaatactgcttaattgctgataccatatgaatgaaacatgggctgtgattactgcaatcactgtgctatcggcagatgatgctttggaagatgcagaagcaataataaagtacttgactacctactggtgtaatctcaatgcaagccccaactttcttatccaactttttcatagtaagtgcgaagactgagccagattggccaattaaaaacgaaaacctgactaggttctgtagagccaattagacttgaaatacgtttgtgtttctagaatcacagctcaagcattctgtttatcgctcactctcccttgtacagccttattttgttggtgctttgcattttgatattgctgtgagccttgcatgacatcatgaggccggatgaaacttctcagtccagcagtttccagtcctaacaaatgctcccacctgaatttgtatatgactgcatttgtgggtgtgtgtgtgttttcagcaaattccagatttgtttccttttggcctcctgcaaagtctccagaagaaaatttgccaatctttcctactttctatttttatgatgacaatcaaagccggcctgagaaacactatttgtgactttttaaacgattagtgatgtccttaaaatgtggtctgccaatctgtacaaaatggtcctatttttgtgaagagggacataagataaaatgatgttatacatcaatatgtatatatgtatttctatatagacttggagaatactgccaaaacatttatgacaagctgtatcactgccttcgtttatatttttttaactgtgataatccccacaggcacattaactgttgcacttttgaatgtccaaaatttatattttagaaataataaaaagaaagatacttacatgttcccaaaacaatggtgtggtgaatgtgtgagaaaaactaacttgatagggtctaccaatacaaaatgtattacgaatgcccctgttcatgtttttgttttaaaacgtgtaaatgaagatctttatatttcaataaatgatatataatttaaagtt

SEQ ID NO: 710 - DNA, 1579 bp, Homo sapiens
atccttcgcgtactgacggaaacactggcggcacatattgaggccgtatttcaggatcagctgccggttcgaacacacgcgagaagagcaaagaagttaaaagagaagtgtctgtgtggctccttccacgtgggtgaaggactgtgccagctgagaggtggtagagcaggaagctgcctgagacctccatttatttggtgaaaaaccgccgcccttaagagagcaagtcgagggccgtgtaggagttggaggagagaaatgaaattttggaagagtcagcagaagatcgtcagtatttaaacacatcacatcatgcgtgagtacaagctagtggtccttggttcaggaggcgttgggaagtctgctctgacagttcagtttgttcagggaatttttgttgaaaaatatgacccaacgatagaagattcctacagaaagcaagttgaagtcgattgccaacagtgtatgctcgaaatcctggatactgcagggacagagcaatttacagcaatgagggatttgtatatgaagaacggccaaggttttgcactagtatattctattacagctcagtccacgtttaacgacttacaggacctgagggaacagattttacgggttaaggacacggaagatgttccaatgattttggttggcaataaatgtgacctggaagatgagcgagtagttggcaaagagcagggccagaatttagcaagacagtggtgtaactgtgcctttttagaatcttctgcaaagtcaaagatcaatgttaatgagatattttatgacctggtcagacagataaataggaaaacaccagtggaaaagaagaagcctaaaaagaaatcatgtctgctgctctaggcccatagtcagcagcagctctgagccagattacaggaatgaagaactgttgcctaattggaaagtgccagcattccagacttcaaaaataaaaaatctgaagaggcttctcctgttttatatattatgtgaagaatttagatcttatattggtttgcacaagttccctggagaaaaaaattgctctgtgtatatctcttggaaaataagacaatagtatttctcctttgcaatagcagttataacagatgtgaaaatatacttgactctaatatgattatacaaaagagcatggatgcatttcaaatgttagatattgctactataatcaaatgatttcatattgatctttttatcatgatcctacctatcaagcactaaaaagttgaaccattatactttatatctgtaatgatactgattatgaaatgtcccctgaaactcattgcagcagataacttttttgagtcattgacttcattttatatttaaaaaattatggaatatcatctgtcattatattctaattaaaattgtgcataatgctttggaaaaatgggtcttttataggaaaaaaactgggataactgatttctatggctttcaaagctaaaatatataatatactaaaccaactctaatattgcttcttgtgttttactgtcagattaaattacagcttttatggatgattaaattttagtacattttc

SEQ ID NO: 711 - DNA, 2035 bp, Homo sapiens
gaattccgggctccggggatgaggtcgcggccggcgggtcccgcgctgttgctgctgctgctcttcctcggagcggccgagtcggtgcgtcgggcccagcctccgcgccgctacaccccagactggccgagcctggattctcggccgctgccggcctggttcgacgaagccaagttcggggtgttcatccactggggcgtgttctcggtgcccgcctggggcagcgagtggttctggtggcactggcagggcgaggggcggccgcagtaccagcgcttcatgcgcgacaactacccgcccggcttcagctacgccgacttcggaccgcagttcactgcgcgcttcttccacccggaggagtgggccgacctcttccaggccgcgggcgccaagtatgtagttttgacgacaaagcatcacgaaggcttcacaaactggccgagtcctgtgtcttggaactggaactccaaagacgtggggcctcatcgggatttggttggtgaattgggaacagctctccggaagaggaacatccgctatggactataccactcactcttagagtggttccatccactctatctacttgataagaaaaatggcttcaaaacacagcattttgtcagtgcaaaaacaatgccagagctgtacgaccttgttaacagctataaacctgatctgatctggtctgatggggagtgggaatgtcctgatacttactggaactccacaaattttctttcatggctctacaatgacagccctgtcaaggatgaggtggtagtaaatgaccgatggggtcagaactcttcctgtcaccatggaggatactataactgtgaagataaattcaagccacagagcttgccagatcacaagtgggagatgtgcaccagcattgacaagttttcctggggctatcgtcgtgacatggcattgtctgatgttacagaagaatctgaaatcatttcggaactggttcagacagtaagtttgggaggcaactatcttctgaacattggaccaactaaagatggactgattgttcccatcttccaagaaaggcttcttgctgttgggaaatggctgagcatcaatggggaggctatctatgcctccaaaccatggcgggtgcaatgggaaaagaacacaacatctgtatggtatacctcaaagggatcggctgtttatgccatttttctgcactggccagaaaatggagtcttaaaccttgaatcccccataactacctcaactacaaagataacaatgctgggaattcaaggagatctgaagtggtccacagatccagataaaggtctcttcatctctctaccccagttgccaccctctgctgtccccgcagagtttgcttggactataaagctgacaggagtgaagtaatcatttgagtgcaagaagaaagaggcgctgctcactgttttcctgcttcagtttttctcttatagtaccatcactataatcaacgaacttctcttctccacccagagatggcttttccaacacattttaattaaaggaactgagtacattaccctgatgtctaaatggaccaaagatctgagatccattgtgattatatctgtatcaggtcagcagaagaaggaactgagcagttgaactctgagttcatcaattctaatatttggaaattatctacaatggaatcttccctctgttctctgataacctacttgcttactcaatgcctttaagccaagtcaccctgttgcctatgggaggaggtggaaggatttggcaagctcaaccacatgctatttagttagcatcagttgtcaccaacagtctttctgcaaagggcaggagagctttgggggaaaggaaaaggcttaccaggctgctatggtcaactcttcagaaattttcagagcaatctaaaagcgccaaaattcgctatgtttacagtgatactattaagaaaatgaatgtgattctgctctgtctttttaagtatgatcaaataaaaaatttgtacatcacaatcatttctacc

SEQ ID NO: 712 - DNA, 700 bp, Homo sapiens
ttctctctaggggagagtacggtttccatgaatatacagaggtcaaaacagtcacagtgaaaatctctcagaagaactcataaagaaaatacaagagtggagagaagctcttcaatagctaagcatctccttacagtcactaatatagtagattttaaagacaaaatttttcttttcttgattttttttaaacataagctaaatcatattagtattaatactacccatagaaaacttgacatgtagcttcttctgaaagaattatttgccttctgaaatgtgacccccaagtcctatcctaaataaaaaaagacaaattcggatgtatgatctctctagctttgtcatagttatgtgattttcctttgtagctacttttgcaggataataattttatagaaaaggaacagttgcatttagcttctttcccttagtgactcttgaagtacttaacatacacgttaactgcagagtaaattgctctgttcccagtagttataaagtccttggactgttttgaaaagtttcctaggatgtcatgtctgcttgtcaaaagaaataatccctgtaatatttagctgtaaactgaatataaagcttaataaaaacaaccttgcatgattcttgttacttttgaatttttttaagtacaagttttggtcacagtgatttcttcttgtcacttaaaaacagtgttaaa

SEQ ID NO: 713 - DNA, 952 bp, Homo sapiens
gcagtctgcagcatggcgtacccggggcatcctggcgccggcggcgggtactacccaggcgggtatggaggggctcccggagggcctgcgtttcccggacaaactcaggatccgctgtatggttactttgctgctgtagctggacaggatgggcagatagatgctgatgaattgcagagatgtctgacacagtctggcattgctggaggatacaaaccttttaacctggagacttgccggcttatggtttcaatgctggatagagatatgtctggcacaatgggtttcaatgaatttaaagaactctgggctgtactgaatggctggagacaacactttatcagttttgacactgacaggagtggaacagtagacccacaagaattgcagaaggccctgacaacaatgggatttaggttgagtccccaggctgtgaattcaattgcaaaacgatacagcaccaatggaaagatcaccttcgacgactacatcgcctgctgcgtcaaactgagggctcttacagacagctttcgaagacgggatactgctcagcaaggtgttgtgaatttcccatatgatgatttcattcaatgtgtcatgagtgtttaaatcaagaggaagctgcatgaatgtaatcaacattccaactggagctctcctttgcttgtcctctttgccttcggtaatatgtataaacttacatcacgactttctcttaacagctgttgtaaagtttattactttatgtacaactgaagttttgttttagttttgataataaattcttggaactttaataagatctagtctgttacaccatttagaactttcctcagccattatcagtcatgccttattttcttgctaaaactctatgtaaatttaagtatgcaaaatgtttaagtcacattatttatttttcattgtgagatactaaaaactgttatcagac

SEQ ID NO: 714 - DNA, 1081 bp, Homo sapiens; identical to SEQ ID NO: 155

SEQ ID NO: 715 - DNA, 1104 bp, Homo sapiens
ctctagagtcgagatccattgtgctctaaagtggatacagaaatctctgcaggcaagttgctccagagcatattgcaggacaagcctgtaacgaatagttaaattcacggcatctggattcctaatccttttccgaaatggcaggtgtgagtgcctgtataaaatattctatgtttaccttcaacttcttgttctggctatgtggtatcttgatcctagcattagcaatatgggtacgagtaagcaatgactctcaagcaatttttggttctgaagatgtaggctctagctcctacgttgctgtggacatattgattgctgtaggtgccatcatcatgattctgggcttcctgggatgctgcggtgctataaaagaaagtcgctgcatgcttctgttgtttttcataggcttgcttctgatcctgctcctgcaggtggcgacaggtatcctaggagctgttttcaaatctaagtctgatcgcattgtgaatgaaactctctatgaaaacacaaagcttttgagcgccacaggggaaagtgaaaaacaattccaggaagccataattgtgtttcaagaagagtttaaatgctgcggtttggtcaatggagctgctgattggggaaataattttcaacactatcctgaattatgtgcctgtctagataagcagagaccatgccaaagctataatggaaaacaagtttacaaagagacctgtatttctttcataaaagacttcttggcaaaaaatttgattatagttattggaatatcatttggactggcagttattgagatactgggtttggtgttttctatggtcctgtattgccagatcgggaacaaatgaatctgtggatgcatcaacctatcgtcagtcaaacccctttaaaatgttgctttggctttgtaaatttaaatatgtaagtgctatataagtcaggagcagctgtctttttaaaatgtctcggctagctagaccacagatatcttctagacatattgaacacatttaagatttgagggatataagggaaaatgatatgaatgtgtatttttactcaaaataaaagtaactgtttaaaaaaaaaaaaaaaaaaaaa

SEQ ID NO: 716 - DNA, 3196 bp, Homo sapiens
aagcttaggagctgaagaccctggttcaatcccgggcccagagatcatttattctatggctttaggtaagctatttattgatacttctgtgggcctcagtttcattattggtaaaaattatttcattattggtaaaattagacttaagtcctaatccttaagtcagaacagatccaattcttagagaaaaaggatatccagagagaactttctgcggtgtctgggacgcagcagtgccacacgaatggcagctgtgagtaatattcctcctctctggaaatgattcccgggagggactagggcaacgagagccactccaggtctgagaacatggagaacttgagatcagtgcttttggaagtgtggtcaacacagtttgtcaccaaagagataagggtctggcacccaaagataaatgaatgatgttacgaagcacactgtttaggtcagttggcgtatttttccagagcaaggcttctcaggctgggcgtggtggctcacaccagtaatcccagcactttttgggcagatgggttgagcccaggagttcgagaccagcctggacaacacagagaaaccccgtgtctacaaaaaatacaaaaattagctgggcatggtagcatgtgcctatagtcccagctactcaggaggctgaggttggaggacagcctgagcctgggaagtcaaggctgcagtgagccgagatctcaccactgtattccagcctaggcaacagagcaaaactctgtctcaaaaaaacaaaaacaaaaacaaaaaacccaaaagactttctggatgacggaagcagtgtctagattcacattctgaggcaaaacctttattttgtcgtggacaattccagtttgtggcccttccttagggaagcactgcttttgttcccgctgcatgtgctaacttccattcattcatggttctatccctttgtagccttcccttcacacttctcacttgcgtttcttccatctctgggcagactgttccaccaacaacccctcccaggctaagctgcggcgggagctcgacgaatccctccaggtcgctgagaggttgaccaggaaatacaacgagctgctaaagtcctaccagtggaagatgctcaacacctcctccttgctggagcagctgaacgagcagtttaactgggtgtcccggctggcaaacctcacgcaaggcgaagaccagtactatctgcgggtcaccacggtgagctgtgtcccggccacatgctgtcggtcggagcccgacgtgtgatcgagcaggggcatgtgtgcttttgactgagcatttatcacacggcagaaaatagaaaactttaggcgcccctgttgccttgaagcctcatcacccactcagggaaaatataaccctgctttacaaaggagcaaagtaagagaggttccacagcttggccaaggtgtgatagctagacagatgacttggacgggtatttgaaccatgcatgcctggctgccaagcctgtattttgttgttgttgtttttgttttggtgcacaaatctgtgaataaaccagaagcctctgttcttttctcaaagctacaaggctgccctctggcatgtaaaatggcttatgaattagtacatcactctctgccagtgataaaaacttctctctaggccagacatggtgctcatgcctgtaatcccagcactttgggaggcagaggcaagaggatgttgaggccaggaatttgagaccagcctgggcaacacagcaagattccctctctacaaaaaatacaaaaatcagtcaggtgtggtggcacacacttgtagtcccagctattcaggaggctgaggtgggaggattgcctgagccctgaagtggaggctgcagtgagctgtgatcacgccactgcactccagcctgggtgacagagtgagactctgtctcttaaaaaatatatatatataaaataataaaataaagtaaaaaatcaaataaaacttatttctagtactgggaactcttctttttcttttctttcttccctccaggccctctggattccttttctaccctactctgaccaagggctgcctaaagcaaatgtttggaaaccacttttattctttggggtgctccctgggctggtcatttgcagatgacatttgccccaacacatgagtgtctgtgaaccaggtccgttctgtccactgagctgtacttacgtctagatgtataagaagcatggggtcagctctctaggtttccttggaggagcaggaggacttccttatcagaagcctgacttctgttgcagagcgcatgcattttgaccacagtgtttcagctcttcccttttctcttgttccatttaggtggcttcccacacttctgactcggacgttccttccggtgtcactgaggtggtcgtgaagctctttgactctgatcccatcactgtgacggtccctgtagaagtctccaggaagaaccctaaatttatggagaccgtggcggagaaagcgctgcaggaataccgcaaaaagcaccggtaagcaggcgggcctttcctgcgcgtgcagggcccagtgagtctctgggagccacaaaaaaacaaacaaagtgcagactctatagcctggtgggaacgactccgcccggagccagagcccaagaacaaagccaggaagttacgggggaattttatttttcctttggaggatgttttactttggaggataactgttttttatttcagggaggagtgagatgtggatgttgcttttgcacctacgggggcatctgagtccagctccccccaagatgagctgcagccccccagagagagctctgcacgtcaccaagtaaccaggccccagcctccaggcccccaactccgcccagcctctccccgctctggatcctgcactctaacactcgactctgctgctcatgggaagaacagaattgctcctgcatgcaactaattcaataaaactgtcttgtgagctgatcgcttggagggtcctctttttatgttgagttgctgcttccggcatgccttcattttgctatggggggcaggcaggggggatggaaaataagtagaaacaaaaaagcagtggctaagatggtatagggactgtcataccagtgaagaataaaagggtgaagaataaaagggatatgatgacaaggttgatccgttga

SEQ ID NO: 717 - DNA, 1540 bp, Homo sapiens
gccctcggccccgggccggcccgccccgcctcggccgccgcctggcgagccgccgggtccccgctcggccggtggccgaggccggagggccgcggcgggcggcggccgaggcggctccggccagggccgggccgggggccggggggcggcggcgggcaggcggccgcgtcggccggggccgggacgatgactctggagtccatgatggcgtgttgcctgagcgatgaggtgaaggagtccaagcggatcaacgccgagatcgagaagcagctgcggcgggacaagcgcgacgcccggcgcgagctcaagctgctgctgctcggcacgggcgagagcgggaagagcacgttcatcaagcagatgcgcatcatccacggcgccggctactcggaggaggacaagcgcggcttcaccaagctcgtctaccagaacatcttcaccgccatgcaggccatgatccgggccatggagacgctcaagatcctctacaagtacgagcagaacaaggccaatgcgctcctgatccgggaggtggacgtggagaaggtgaccaccttcgagcatcagtacgtcagtgccatcaagaccctgtgggaggacccgggcatccaggaatgctacgaccgcaggcgcgagtaccagctctccgactctgccaagtactacctgaccgacgttgaccgcatcgccaccttgggctacctgcccacccagcaggacgtgctgcgggtccgcgtgcccaccaccggcatcatcgagtaccctttcgacctggagaacatcatcttccggatggtggatgtggggggccagcggtcggagcggaggaagtggatccactgctttgagaacgtgacatccatcatgtttctcgtcgccctcagcgaatacgaccaagtcctggtggagtcggacaacgagaaccggatggaggagagcaaagccctgttccggaccatcatcacctacccctggttccagaactcctccgtcatcctcttcctcaacaagaaggacctgctggaggacaagatcctgtactcgcacctggtggactacttccccgagttcgatggtccccagcgggagccccaggcggcgcgggagttcatcctgaagatgttcgtggacctgaaccccgacagcgacaagatcatctactcacacttcacgtgtgccaccgacacggagaacatccgcttcgtgttcgcggccgtgaaggacaccatcctgcagctcaacctcaaggagtacaacctggtctgagcgccccaggcccagggagacgggatggagacacggggcaggaccttccttccacggagcctgcgctgccgggcgggtggcgctgccgagtccgggccggggctctgccgcgggaggagattttttttttttcatatttttaacaaatggtttttatttcacagttatcaggggatgtacatctctccctccgtacacttcgcgcaccttctcaccttttgtcaacggcaaaggcagcctttttctggccttgacttatggctcgcttttttct

SEQ ID NO: 718 - DNA, 1581 bp, Homo sapiens
ataactaaattacattttcttggtcttttgactatgaaatagtttaccctagcaacatgaaaaacaagagacctaagctattagaagaaatgcagttctatgtatcttgtgtgtatagtttttccctgggtggttttcaacgaccagtgactccttagctggtttcctcagctgctagcacttgctctgggtacttgtcctcaacacgtccatctgcaacaatgtgtgcctaggaaataaactcaacttactactcacccaaccaaaatgtaattttttaaacgcagcacacactgggtggattccaaagtcatgattatgctttactatgcactctgtactattcagaccactactctcattcattactgcaattaactgcacacataactattttttattgctaattatacaccactgatttccactttaaaaaaacattagcatttgtctctaattaaatatttactgcttgtgttttacagacccgatatcaggttcttctttagactgggcttatgacctgggcatcaaacacacatttgcctttgagctccgagataaaggcaaatttggttttctccttccagaatcccggataaagccaacgtgcagagagaccatgctagctgtcaaatttattgccaagtatatcctcaagcatacttcctaaagaactgccctctgtttggaataagccaattaatccttttttgtgcctttcatcagaaagtcaatcttcagttatccccaaatgcagcttctatttcacctgaatccttctcttgctcatttaagtcccatgttactgctgtttgcttttacttactttcagtagcaccataacgaagtagctttaagtgaaaccttttaactacctttctttgctccaagtgaagtttggacccagcagaaagcattattttgaaaggtgatatacagtggggcacagaaaacaaatgaaaaccctcagtttctcacagattttcaccatgtggcttcatcaatttatgtgctaatacaataaaataaaatgcacttaatgctttaaaattcatctttttatgataaacaatattctctgtatttctctatagcattaataatcaatattaatgccattcattcagtctgttaataagaaataatatcttcaattttcaaaaacataatttgcctatctttttctgatagaagtagacattgtttatatcttcaaaaaagcaaaaggatgtcctagcaggaaataaagtggttcatatagagatgaatctcagtcctttaaataaccgatccagttctcatcagcataatgtacattaaattcaaaatagtttaatttaacctgccataatcagaagaaaccacctgctaaaacatctgtttgccggtacagacacagacaagacagtctggtcagctgtgacccctgccctcctaatggatagaaaggaaacctggaaacatactgtaagttgaggacggaaagtcatgttgaccaaaggcaatcagggtaacttgctgcatttgtaccatttatactcctattatttaagatagtattattggatagcttctccc

SEQ ID NO: 719 - DNA, 2287 bp, Homo sapiens
gtggggtaacagctactttggtgttaaacccaccccctcacctgccttttgtggtatagctggtgaccctaatcatcaggccattgcaacatagcatggaagatggtgcgaggtggcgtgtggtccctggccttctccctctactgccttgcaccataggccatgtcctcccagcagcaccagctgagtagacttcagaagtggcttgagcccttataccatggttatgtcaaagggagtgggccctggggtggagggtaccctcatcactggtggcagccattaactatttccttccctgcctagtcctggcataaggcctgctttcgatgtgccaagtgtggcaaaggccttgagtcaaccaccctggcagacaaggatggcgagatttactgcaaaggtgggtgttttcacttctaattgagggtcaggaggcccaagggggtaggggggctaagtagttttgcctttgctgaatgtaaactaattcctggccttgggatccaagatctgaacatctagtatgattccttcattgtacagatgaggaaacaagaccagagggggaaagcaacttggccagcatcatctggcaaattgaggcaggcatagggctagaccctggcttcctaactcccagtccaatgttcttacagcagatgatgcttctataattttggtggcaggggcaatgggtacagggtacaaccaagagcctcttcgctattttactattgagattggggtgctgtggaggtgagggggtaccagtggaccttccttccctagcagtctggctgggcactaggagtgggggatcttcagcaggagggtgggtggtgtggctgggggtggaggaagaacatgcccttatctctctcctctctctgcaggatgttatgctaaaaacttcgggcccaagggctttggttttgggcaaggagctggggccttggtccactctgagtgaggccaccatcacccaccacaccctgcccactcctgcgcttttcatcgccattccattcccagcagctttggagacctccaggattatttctctgtcagccctgccacatatcactaatgacttgaacttgggcatctggctccctttggtttgggggtctgcctgaggtcccaccccactaaagggctccccaggcctgggatctgacaccatcaccagtaggagacctcagtgttttgggtctaggtgagagcaggcccctctccccacacctcgccccacagagctctgttcttagcctcctgtgctgcgtgtccatcatcagctgaccaagacacctgaggacacatcttggcacccagaggagcagcagcaacaggctggagggagagggaagcaagaccaagatgaggaggggggaaggctgggttttttggatctcagagattctcctctgtgggaaagaggttgagcttcctggtgtccctcagagtaagcctgaggagtcccagcttagggagtcactattggaggcagagaggcatgcaggcggggtcctaggagcccctgcttctccaggcctcttgcctttgagtctttgtggaatggatagcctcccactaggactgggaggagaataacccaggtcttaaggaccccaaagtcaggatgttgtttgatcttctcaaacatctagttccctgcttgatgggaggatcctaatgaaatacctgaaacatatattggcatttatcaatggctcaaatcttcatttatctctggccttaaccctggctcctgaggctgcggccagcagagcccaggccagggctctgttcttgccacacctgcttgatcctcagatgtggagggaggtaggcactgcctcagtcttcatccaaacacctttccctttgccctgagacctcagaatcttccctttaacccaagaccctgcctcttccactccacccttctccagggacccttagatcacatcactccacccctgccaggccccaggttaggaatagtggtgggaggaaggggaaagggctgggcctcaccgctcccagcaactgaaaggacaacactatctggagccacccactgaaagggctgcaggcatgggctgtacccaagctgatttctcatctggtcaataaagctgtttagaccagaactctggtgtccaatcctgtgtctgtggagctgggagggaactcaatgggagcaatcaaattagcaggggctttgggaggccgaggcaggcggatcacctgaggtcaggagtttgagaccagcctggctaacatg

SEQ ID NO: 720 - DNA, 2320 bp, Homo sapiens
gggccggccgcccctccgccagccaagtccgccgctctgacccccggcagcaagtcgccaccatggtgaagatcgtgacagttaagacccaggcgtaccaggaccagaagccgggcacgagcgggctgcggaagcgggtgaaggtgttccagagcagcgccaactacgcggagaacttcatccagagtatcatctccaccgtggagccggcgcagcggcaggaggccacgctggtggtgggcggggacggccggttctacatgaaggaggccatccagctcatcgctcgcatcgctgccgccaacgggatcggtcgcttggttatcggacagaatggaatcctctccacccctgctgtatcctgcatcattagaaaaatcaaagccattggtgggatcattctgacagccagtcacaacccagggggccccaatggagattttggaatcaaattcaatatttctaatggaggtcctgctccagaagcaataactgataaaattttccaaatcagcaagacaattgaagaatatgcagtttgccctgacctgaaagtagaccttggtgttctgggaaagcagcagtttgacttggaaaataagttcaaacccttcacagtggaaattgtggattcggtagaagcttatgctacaatgctgagaagcatctttgatttcagtgcactgaaagaactactttctgggccaaaccgactgaagatctgtattgatgctatgcatggagttgtgggaccgtatgtaaagaagatcctctgtgaagaactcggtgcccctgcgaactcggcagttaactgcgttcctctggaggactttggaggccaccaccctgaccccaacctcacctatgcagctgacctggtggagaccatgaagtcaggagagcatgattttggggctgcctttgatggagatggggatcgaaacatgattctgggcaagcatgggttctttgtgaacccttcagactctgtggctgtcattgctgccaacatcttcagcattccgtatttccagcagactggggtccgcggctttgcacggagcatgcccacgagtggtgctctggaccgggtggctagtgctacaaagattgctttgtatgagaccccaactggctggaagttttttgggaatttgatggacgcgagcaaactgtccctttgtggggaggagagcttcgggaccggttctgaccacatccgtgagaaagatggactgtgggctgtccttgcctggctctccatcctagccacccgcaagcagagtgtggaggacattctcaaagatcattggcaaaagcatggccggaatttcttcaccaggtatgattacgaggaggtggaagctgagggcgcaaacaaaatgatgaaggacttggaggccctgatgtttgatcgctcctttgtggggaagcagttctcagcaaatgacaaagtttacactgtggagaaggccgataactttgaatacagcgacccagtggatggaagcatttcaagaaatcagggcttgcgcctcattttcacagatggttctcgaatcgtcttccgactgagcggcactgggagtgccggggccaccattcggctgtacatcgatagctatgagaaggacgttgccaagattaaccaggacccccaggtcatgttggccccccttatttccattgctctgaaagtgtcccagctgcaggagaggacgggacgcactgcacccactgtcatcacctaagaagacaggcctgatgtggtacgtccctccacccccggacccatccaagtcatctgattgaagagcatgacagaaacaaaatgtattcaccaagcattttaggatttgactttttcactaaccagttgacgagcagtgcatttacaaggcactgccaaacaagatgcccttgggagctgtgagggaaagaggacctgcgggcttagatcaatctcaattccttttcatgccctcctgcattgctgctgcgtgggtatttgtctccttagccatcaggtacagtttacactacaatgtaagctataggtggagcatcagcagtgagtgaggccattcttcatccttaggatgtggcaatgaaatgatggtgcaagttcctttctcttttgtgaatctttccccccatttcctgtttacatgtaacccaacaaaatgcaatttctagtgccttctgtccaatcagttctttcctctgagtgagacgtacttggctacagatttctgccttgttttgcgacattgtcccattcacacagatattttgggataataaaggaaaataagctaca

SEQ ID NO: 721 - DNA, 3610 bp, Homo sapiens
cctgcctgcccgcctgcttgctctctggctgtgctcctgcttaaagaaatcagtccttcctttccgacttagtcctcgggaagaagtttcagactacaaggtatcattggaacatttcaagatcatcaaatcaaattccacagggattggtgaccaaccagaaggctcagacatctgattgctgacctgtccagacatcatctggtctccctgaacctgaaatcacaccatggatgattttgagcgtcgcagagaacttagaaggcaaaagagggaggagatgcgactcgaagcagaaagaatcgcctaccagaggaatgacgatgatgaagaggaggcagcccgggaacgccgccgccgagcccgacaggaacggctgcggcagaagcaggaggaagaatccttgggacaggtgaccgaccaggtggaggtgaatgcccagaacagtgtgcctgacgaggaggccaagacaaccaccacaaacactcaagtggaaggggatgatgaggccgcattcctggagcgcctggctcggcgtgaggaaagacgccaaaaacgccttcaggaggctctggagcggcagaaggagttcgacccaacaataacagatgcaagtctgtcgctcccaagcagaagaatgcaaaatgacacagcagaaaatgaaactaccgagaaggaagaaaaaagtgaaagtcgccaagaaagatacgagatagaggaaacagaaacagtcaccaagtcctaccagaagaatgattggagggatgctgaagaaaacaagaaagaagacaaggaaaaggaggaggaggaagaggagaagccaaagcgagggagcattggagaaaatcaggtagaggtgatggtggaagagaaaacaactgaaagccaggaggaaacagtggtaatgtcattaaaaaatgggcagatcagttcagaagagcctaaacaagaggaggagagggaacaaggttcagatgagatttcccatcatgaaaagatggaagaggaagacaaggaaagagctgaggcagagagggcaaggttggaagcagaagaaagagaaagaattaaagccgagcaagacaaaaagatagcagatgaacgagcaagaattgaagcagaagaaaaagcagctgcccaagaaagagaaaggagagaggcagaagagagggaaaggatgagggaggaagagaaaagggcagcagaggagaggcagaggataaaggaggaagagaaaagggcagcagaggagaggcagaggataaaggaggaagagaaaagggcagcagaggagaggcagaggataaaagaggaagagaaaagggcagcagaggagaggcaaagggccagggcagaggaggaagagaaggctaaggtagaagagcagaaacgtaacaagcagctagaagagaaaaaacgtgccatgcaagagacaaagataaaaggggaaaaggtagaacagaaaatagaagggaaatgggtaaatgaaaagaaagcacaagaagataaacttcagacagctgtcctaaagaaacagggagaagagaagggaactaaagtgcaagctaaaagagaaaagctccaagaagacaagcctaccttcaaaaaagaagagatcaaagatgaaaagattaaaaaggacaaagaacccaaagaagaagttaagagcttcatggatcgaaagaagggatttacagaagttaagtcgcagaatggagaattcatgacccacaaacttaaacatactgagaatactttcagccgccctggagggagggccagcgtggacaccaaggaggctgagggcgccccccaggtggaagccggcaaaaggctggaggagcttcgtcgtcgtcgcggggagaccgagagcgaagagttcgagaagctcaaacagaagcagcaggaggcggctttggagctggaggaactcaagaaaaagagggaggagagaaggaaggtcctggaggaggaagagcagaggaggaagcaggaggaagccgatcgaaaactcagagaggaggaagagaagaggaggctaaaggaagagattgaaaggcgaagagcagaagctgctgagaaacgccagaagatgccagaagatggcttgtcagatgacaagaaaccattcaagtgtttcactcctaaaggttcatctctcaagatagaagagcgagcagaatttttgaataagtctgtgcagaaaagcagtggtgtcaaatcgacccatcaagcagcaatagtctccaagattgacagcagactggagcagtataccagtgcaattgagggaacaaaaagcgcaaaacctacaaagccggcagcctcggatcttcctgttcctgctgaaggtgtacgcaacatcaagagtatgtgggagaaagggaatgtgttttcatcccccactgcagcaggcacaccaaataaggaaactgctggcttgaaggtaggggtttctagccgcatcaatgaatggctaactaaaaccccagatggaaacaagtcacctgctcccaaaccttctgacttgagaccaggagacgtatccagcaagcggaacctctgggaaaagcaatctgtggataaggtcacttcccccactaaggtttgagacagttccagaaagaacccaagctcaagacgcaggacgagctcagttgtagagggctaattcgctctgttttgtatttatgttgatttactaaattgggttcattatcttttatttttcaatatcccagtaaacccatgtatattatcactatatttaataatcacagtctagagatgttcatggtaaaagtactgcctttgcacaggatcctgtttctaaagaaacccatgctgtgaaatagagacttttctactgatcatcataactctgtatctgagcagtgataccaaccacatctgaagtcaacagaagatccaagtttaaaattgctgcggaatgtgtgcagtatctagaaaaatgaaccgtagtttttgtttttttaaatacagaagtcatgttgtttctgcactttataataaagcatggaagaaattatcttagtaggcaattgtaacactttttgaaagtaacccatttcagatttgaaatactgcaataatggttgtctttaaaaaaaaaaagaatgtactgttaaggtattactttttttcatgctgatgattcatatctaaattacattattatgttagctgacagtggtactgattttttaggttggttgttttgtggatttctttagtagtgatagtagcctgaaccacattttagataactcaattatgtatgtatgtgcatacacatatacaaacacactaatggtagaatgcttttttatgtgctagactattatatttagtagtatgtcattgtaactagccaatatcacagcttttgaaaaattaaaaaatcatcatcactataatatttcatatttgccaacagaaacatggcagataggtatcaatatgttttcaatgcctgatgacctataagaagaaagtattgaaaagaagagagattagaactgttagaaggagttgaaattttctaaaagacatagtatttagtttataattaaatgcattcttgaagtcc

SEQ ID NO: 722 - DNA, 1071 bp, Homo sapiens; identical to SEQ ID NO: 170

SEQ ID NO: 723 - DNA, 1083 bp, Homo sapiens
atcctgtctgtccgaacccagacacaagtcttcactccttcctgcgagccctgaggaagccttctttccccagacatggccaacaagggtccttcctatggcatgagccgcgaagtgcagtccaaaatcgagaagaagtatgacgaggagctggaggagcggctggtggagtggatcatagtgcagtgtggccctgatgtgggccgcccagaccgtgggcccttgggcttccaggtgtggctgaagaatggcgtgattctgagcaagctggtgaacagcctgtaccctgatggctccaagccggtgaaggtgcccgagaacccaccctccatggtcttcaagcagatggagcaggtggctcagttcctgaaggcggctgaggactctggggtcatcaagactgacatgttccagactgttgacctctttgaaggcaaagacatggcagcagtgcagaggaccctgatggctttgggcagcttggcagtgaccaagaatgatgggcactaccgtggagatcccaactggtttatgaagaaagcgcaggagcataagagggaattcacagagagccagctgcaggagggaaagcatgtcattggccttcagatgggcagcaacagaggggcctcccaggccggcatgacaggctacggacgacctcggcagatcatcagttagagcggagagggctagccctgagcccggcgctcccccagctccttggctgcagccatcccgcttagcctgcctcacccacacccgtgtggtaccttcagccctggccaagctttgaggctctgtcactgagcaatggtaactgcacctgggcagctcctccctgtgcccccagcctcagcccaacttcttacccgaaagcatcactgccttggcccctccctcccggcggcccccatcacctctactgtctcctccctgggctaagcaggggagaagcgggctgggggtagcctggatgtgggcgaagtccactgtcctccttggcggcaaaagcccattgaagaagaaccagcccagcctgccccctatcttgtacctggaatatttttggggttggaactc

SEQ ID NO: 724 - DNA, 455 bp, Homo sapiens
  misc_feature (1)...(455): n=a,t,g or c
tacgaatcgatgttttaaatttattaacatgacgatatgcctttgttacacaaaacttgctagagcagagtattttatttttttcttgcacgttttaaatatagatggaccagtgaaatcaatatcagcatttacatgacattaccatgcagaaacacttgataaccgaaagacatatagattggtagaaagaacatctcagacaggttttttttatgtcttcaaaggtttcaccagggtgtggtacagatgaaaagaagtggtgttaatgacctacctgcaccgataataaagcaaatagaatgattatatacattaagatcagcttgattaaaaataaattttatatngcaggtaaattgatncattaaaatgaacccagtttaactcttctcgtgtgttgttttaaggtaggtcactgaaacgcngagataaaatcngatggggaaaattta

SEQ ID NO: 725 - DNA, 399 bp, Homo sapiens
  misc_feature (1)...(399): n=a,t,g or c
nttttacaagtgggcatgagtttttattctcagtgcacagcagtattggtttctgttcatcagcaaaaagctttattggctccaacaaattatcccttttaaaactcctcttcttcttctggtctcagtggaacaacacatttgaatttcagatttgcagtttatagcattttttttccctaagaaccatataaatacatgcaaaaccttgtacatagagcttaaataatatcaaaatgcaaatatagattgggtgcactgttaagctgaattgcaaattatggcaacacacactggactggggtatacgttgctttgatatcaccatttgtttgtttatgtcatgcagaccacaatagtcaatcntttgnttttcctttttgnacaaaaataccagtg

SEQ ID NO: 726 - DNA, 503 bp, Homo sapiens
agcttgttcaaatatcttatttaatattagagtcacaaattacacattttgttatatttaaatcccttgggccttgtaatcaaagaagcacatgcagattgacttttacatgctgtgtagtattccttaggtgcaatagatagaaagtgaggatatttgtccacctactcagattttcaagatcagattccaccggtttagtagttttcagtggaggagccagtggaatttgggctcatttggaaatcttggcaatcaaaagcattctgagaggcagtgttgcttcaatccaagtattgggggagtttaccatcttctcccagagagcaacttcctctgaagtagagtccatccagtccacttcagtcccataacttttacctgttccaaagccaatacgaagacctcccaaaaattggttgggttaatttgtaatggtcccagacagtaagccctacacaggcttccatcagatcttcaggcctgaacccatcatacaccat

SEQ ID NO: 727 - DNA, 432 bp, Homo sapiens
  misc_feature (1)...(432): n=a,t,g or c
ccattaaaaaaactttattttcattttttacaaagaatatccccatctgggtcaaaaatatanctggttaagtacnaaatatagtctttaccatacanaaagatncataanacaaaaacatgaaaccaaccatcttcagcccacactttctggctgtaatanctctcagaaaagggtggagctcagtgctctgncacaggacagtgaacaaagtgctatggctgagagtgactgaccaagtgctggcagctgcacgtgaggggccaatatccctatctcctaacacagggcaggaagggggttcaaagggcttntatagaagacctgccctctagtttcctcatnggcagtatttcggaggttctgatncacagggttgggcatcttggatcaagagttcctccttggggtttgaagtnacagtggggcaag

SEQ ID NO: 728 - DNA, 375 bp, Homo sapiens
  misc_feature (1)...(375): n=a,t,g or c
tcgcattcaacttaaatgnttaacatngacaatgtcttggaacaataagcaaacaatgcttaaatttttcattcaaattcactttccacatgtcaaaagacctcaaggtagaaaaaaataaaataaaaatataaatatctgagaatccatcttaataaataaattaaaaacncnnnccaacgttttcacnnccccntgttaatgtcagaacattcagaccacctcaacaatgcatgatcagtaacattacaatgaacattgatgttgaagaaaaactacagtacatggatatagctatttatttctatctaccagaaaataaagtcgtatcttttcttagtataatattggtcatttctaatcagaacacactat

SEQ ID NO: 729 - DNA, 425 bp, Homo sapiens
  misc_feature (1)...(425): n=a,t,g or c
aanaaaaggccctcaaatatatacagacaaaaaattactgtgaagattttttcgggaaaagctaccaaattcagtgttgtgagaaaaactggtaaccatgcagaaattttaacatctatgaattttttttccaaaatacacacatatttttttaaaaaaggaattctgtgtcaagtataactcaaaataaatacaaattcacaagtagaactattgaatacttcatatggggtaaacaccattatctcccaactagatcgctagatctaccaactgcaagcgattgtcccttttgaacgtactaaaaccacacactttcccatcccctgggctcctggccctctgagcacttaattctcaatgggcacctggcctgcatggcagggggctttgctgaccacaagagagttccccagttcagccag

SEQ ID NO: 730 - DNA, 454 bp, Homo sapiens
gttgttggaaaaacatttattgcaattcagtgtcaaaagttttttacaaaaatatgccaccgtctggtacaaacaactataaaaaatcagttcatcatgcaagaaaagtgtgcaaataatttatacagaaggactcagctcacacaatattaaataaacatctctgcatgtaattggtctaactttatgctttagttacaatgttcaaccccctctaatacttttcatttaaaaaagtacattaaagcttctaagcttaggacacaggctgtaatatacgcccactttagccatggtgattggcacttggtagaataaagattggcaccaaggattcccaagtatagaatacagcttggagccttctgcttaacagacttgtgcttcgttaattaaacaaacacatctatactcaaagacagaaaaagtcatgtttaaactccagaaataatgt

SEQ ID NO: 731 - DNA, 427 bp, Homo sapiens
aaaaataagatttaatgctttattgctcttgatggcaaatcaaaatatgctttagaaataaagttaatttactggaaaataggagtttttgcaccaaaccataaaattgcatttcattacatcaagagaaccccctcattgtctacaatcatgcccgcttcctttcccctcagcgcccgggacacgtgaccgagatcataccctaaattcctgatccttttgcagttgccacatactgtggttttagtacatcataaaaaagtgcttgtcctgtggcctcagctgggaggcctggcgctggggctaaggggcccaaggcaccatccaaaggctgggaggaaagaacccaaacccaggccctcctcctgccctccagcctttgacaggcaactcatttgggcatgatctgttttggtgtgtttaaaac

SEQ ID NO: 732 - DNA, 399 bp, Homo sapiens
cagaggatctttacatgtttattaaatctgaatttgaagatacattccaatcttgcataaagtgtttgttgggcttttacattacgtaattaaaaaacaaaattttttaaccaattttatgtgccatgtcacgtttaatgctatcttgtgtgaccagatcccaccagtaatgacaaaactgtcttaaacctcattttttttttttttttgagacaagagtttcactcttgttgcccaaacgagagcaatggcaccatctcgactcactgcaacctctgcctcccaggttcaagcaattctcctgcctcagcctcccaagtagctcgggattacacgcatgcgccaccatgcctggctacttttgtatttttaatagagacagggtttcttcatgttggt

SEQ ID NO: 733 - DNA, 488 bp, Homo sapiens
ttcatattttaaaataatcttttatttgctcaccatagacattctgacctacattacattgatatacattatatttatttgcagtgagaactgaataatttaccacacagtataaatcacaaaattataattcctgaatttctagcattattgttatgcatgtgagcggttaaccagaataatcaaacatcattgatgttaatctaagtgagaagttggtaataaacacttctaattatgaatctagaaatttcaggagacaaattccaccattgaattcttgtatcttcagaatcagacctagcatatataatcagaaaataaattttgaagttcaaatcagtggtgtgtgtgttagaaatgtcaacatgtaaaacagaatgctagttaacaatcacattttcctaagaaaaaatttgcatcttaatcatacgaatatcacgaaaacagaccatttccagttttcactgtagtcctggatggttttc

SEQ ID NO: 734 - DNA, 426 bp, Homo sapiens
gaggtttggaaatgtgcttttattttcaaactcaggtatgtgacactctacagttcaatgctagcacacctgtgtgaggcttaacaacatgaggaactgatagccagtgatacacaaatccagcacttcctctccatttactctgtcaggctgtatatggggagcaacacatatggctttgtggcagccagaaagtgaaggtctttttaggaggtgacatcaacaatgacacaaacacatcactctgcaactgaaggcagggaaccagactcctagggctaagcagagatgtcagacttcagaggcatttgggggactcttcagatccacatcctcactgaaaatccagggcctgtttctctccagttcactaccgcttgggcagcagctcccactgcttcaggctgggtctttgctttccagaaa

SEQ ID NO: 735 - DNA, 228 bp, Homo sapiens
ttttttttttttttctcttcaaatatttaatcagtttggagacctctgcattccaatccaattgggtaaaaattctaaagaaagcaagattaaggggtcctcaaagaaaacactgggctaaaatggagaggagactgggtttgggaagacagaacatagcatgtgtctgaaggcctttcgaaggaattctacgacatattttttaaaaatactccaaatgaacaagac

SEQ ID NO: 736 - DNA, 426 bp, Homo sapiens
  misc_feature (1)...(426): n=a,t,g or c
cggtagagacagggtcttgctatgttgcccaggctagtctcaaactcctgggctcaagcagttcttgcctcagcctcccaaattgctgggattacaggcatgagccaccatgactggcctaaaacaaaataaattcttaatggcatttcgtggaatgtgtttaagagccaaaactgtgaaaatgtaagctttatctttcttttttcctagattatttaaagaggattgtagccacacttcagatgaatgtttacaagccaaataatgatttaagagtgtgctcaataaaaaggccataggtttaagaattaaatggaataatataaattactaggtcaacaagaatatttcatgtatagtacactgtctaaggaatgcagagaaattttacaagaaacccccagactaaatacttcnttaagaaca

SEQ ID NO: 737 - DNA, 447 bp, Homo sapiens; identical to SEQ ID NO: 197

SEQ ID NO: 738 - DNA, 288 bp, Homo sapiens; identical to SEQ ID NO: 198
  misc_feature (1)...(288): n=a,t,g or c

SEQ ID NO: 739 - DNA, 440 bp, Homo sapiens
  misc_feature (1)...(440): n=a,t,g or c
aaattaaattttttattcatttttttgcatcaaaatagtgcttaaaattggaatttatactcacaagacatagctaacatccaaagtagacaattaaaaaatattatttgaaaattatgtacttagtactgaagacttcctaaatttgcacattagctagattgccattagcaccattagagagttgatctttggctaatgattattcaggaaaatttcaaccattacaatcagtgagtataattttatatttcagcaacgatagtgggtcatgttcagcaacagcttcacttacaaattaaagtaagctcacttcagtgttgcactctgatgctgtttttttaccccttctcttgcaaataaccagtgaaataaaaattgcctctaactggcaatcgnaacaagggaggaattatggctagncaactagttgctaatga

SEQ ID NO: 740 - DNA, 307 bp, Homo sapiens
  misc_feature (1)...(307): n=a,t,g or c
tgtatttaaaaaaatttatttgtgatctgtacatgtgataaagtggggtagacctttaaagccaacaaaacaaaaatccaaagtaaaaatgtataaatacaatatatattttcttacaaaaatgggagatttacaaaatatacatactgtacttatcnctattttacaaatttcacatgcacttaaaagatacagcacaaaagatgccaaaacctgtgttggagttttaaaaatctgacagatgagatagttttgaaggttgaagaaacacaagatcgattttaatggaaaaagcagttccactcaa

SEQ ID NO: 741 - DNA, 453 bp, Homo sapiens
ttcaatataaatgtgtaattttaatatttaatttaaaataaaaccaaggctggattgggttgggaaagaacgtttgatttgcagaagaatataggaatttttttaatcacgacattacaagtcatttgtgaaaacagccttcctcctgccaccggtccctatacaacctgcttaggaaatatggaggtgaatcatcccccttacctcttccctaccagggcttggttctccccaaaatccaaaggagaaataaatgtcttccgttgcctcttcccatttttacagtcagcttctaaccccttgcaaagccctgaatcagagccaagcacctcagaaaatgagggtcccttggttctcttattgaagttgggcacatgtggtcagagaagccccaaggaaggccacagggactgacacctttacttttggaatttgtgcagccagtttgtcagg

SEQ ID NO: 742 - DNA, 248 bp, Homo sapiens
atattttcatttttcatcctaatttactgaagccattttctttggttagctttagaattatctttctttatactaaccagcttagcatgtaataattcttgcccatgtgactacaaaacattagatatctccacaaataaaaacgagattcaccaacacaaatattccttctctttaagttcacaaaatgcaagaagaaaagaaaaatgatgttaggttgtcagtaaggaaagcatttctagatgaga

SEQ ID NO: 743 - DNA, 558 bp, Homo sapiens
  misc_feature (1)...(558): n=a,t,g or c
tcttgagtcaatatgatttattgttttctcttctgccattaacattctagctactgggtaagttgttctccatccttgggatctcatggttgggaggagaggtctgggttccctcccacaaaactctcaacgatagaatagaagcacagctgcctcagttatctcacggctgctgctgtaaccaacatgagttccatatccactccaatcaaaaccagaaaaatctccacactgctggggactggcctctggaaaagtatcctcctccaccaatgcagtgatgctcagtgttacatccggtgaccctcattcccagcacacaaggcgttgggctgctctctcgttattaaataccctggaactgaacaaatcccgcagtgaattcccgctgggccataaggggtgagtaataagatgctgtttttctgggcgtcgccaaaaatnatagaccacagggatcaccgggccgntggtcagtccaanactttccttctccatatttcacnggaaaatttcgggtanatgcccaanagattatgtnccagtgtctgggggaaa

SEQ ID NO: 744 - DNA, 409 bp, Homo sapiens
  misc_feature (1)...(409): n=a,t,g or c
agtctagatgaatttattgccattcacatatttcatagaaaaaaagatgtagcaaacgggtcagggttgtacaaaaaaaaaaaaaaatccaggtttatataggttgctctatttacatctgagagcacagctgtcctggcatcaggcacagcagctgcacttgtctgacgtccctttgcagatgcagccctgggcacacttggcacagcccacaggnangcanggagcagcagctcttcttgcaggaggtgcatttgcactctttgcatttgcaggagccggcacaggcacaggagccaacaggcgangcaggagcagttggggtccatttcgaggcaaggagaagcaggagttcccgattcaagaggaaaacacgcagcgggacagattctcgtgccgaattcttggc

SEQ ID NO: 745 - DNA, 298 bp, Homo sapiens
atccagtgtaaaaaggaagttggaatgggagttggcgggcagtgaacgagtgtggggaaggattggtgctggggcaacaggaaggggccttgggcgtttggctgcactaactttggtagctcagtgtgcatctagagtgggacttgggagggagctaagcttgggctgggctgcttggggcttggcatagggtggaaagggctacctggggctctgaccacactgtagtatgtgtggaggggcctcccgtctcccacaacttctgctataacaataaactgtagaggatcttaaagag

SEQ ID NO: 746 - DNA, 436 bp, Homo sapiens
  misc_feature (1)...(436): n=a,t,g or c
gaagtatacttccaagcaaaatttattagatgtctattcaagaaaaacacaatgacctttgcttgtaagaattcaaagtcaattacctggaagccaggtatgaatagttttttcttttaaaatcagatacagagagtagaaacagtaatttttcttaaatatgacaggcaacagatattgaagtcttttctcataaatggcatcaaagagaattattcatttatcagcaaagngcatgcagttgacttaatttcaaacctgaagcctttaaaatatgaagctggttatgaacttgacagaaatcaaggtaggctactcaacgatgtttctttaccttcttcctaatggaaattcccttgtcatcagtcagtagatatgtacatttcatttgggcttctacggatctttttaaccttcataggatttttggcataaa

SEQ ID NO: 747 - DNA, 474 bp, Homo sapiens
  misc_feature (1)...(474): n=a,t,g or c
gaatgtatatatttattataatctccaaaataatttcacttggtacaactgcttcttaaaaccatatcaatatcaggctcagaatttaattacaaccaagcaattcacaaaaacactgagcaacaaaacatgcttaatatttctttgagaaagacccttcaaatatgtgtacagcatcactgggagttacacaaaactgttacaaggtgaccattaagtgccccaattctgcacttctgacatacatgaatggctaatgtaaccacgtttgggaatctttttacatctcaaaataaagctttctgatgcaacttgccatccttttaaattttaaaggatattcttgggtaattccttaggaaagtaaaactacacacactttcagagaaaccaataagctgcttagatttttaaaattttttatattatacacttcaattatggggtatttaattaaagncctccaaaaaaanc

SEQ ID NO: 748 - DNA, 147 bp, Homo sapiens
cagtgtccataaataaagttttattggaatacagccacgttcgttcatgtatgtgttgtctatggctgcttttgcactacaatggcagaattgggtggttgcaacatattttatggcccccagccctaaaatatttactgtttggcc

SEQ ID NO: 749 - DNA, 441 bp, Homo sapiens
ttttttttttgtttcaaccacaagtatttattgatggatcgaagatacaattttaatggaacaataaggcacaaccgtggattaaaacactttgctatacagccaaaaggggggaaaatctataaccttaggaactttatgccaatcaagaagcctctaaagtacctctctaatagatcagtatcagacattcttcccttttacataattcctatattacatcacttaatcataaaatctgactgatacttcataaagaattcctcattcatttatatttgagccatccagcctggctactcccctgttctccacccttttccatcactttgcagtggtattttttagcaatcttcaatagttttccaaagcaaggaaacaagcaagcaagcaatgagtcagaaagtcaaccaagggcagatgtgtgggctaaatacactc

SEQ ID NO: 750 - DNA, 447 bp, Homo sapiens
tttttttttataaagaaattttattgcataattcttgtatacaataaacataggaaaagggtttttaatgaaaattcatgtcatttttcaaaagtgttgaactgtctggagaaaaattattacaaagctatctaaggcaaaaataatatttaaccatctaaacaaaagataatcccctttaccatttgttttgtatttaaagcaagacattttaaacacaagtaatacggagaagttttcaaattgctacgtcatttgcattaagaatttaaatgcatctaagaagtgaagagtttaaacacatgggaatgttctctagtaacagatattgctgctttcttcagatccattctgcttgaatgtaaggctatactttttgcacaccaacagaattctggcatcttctaatggtacagtaagagctggagtgcagagagggaaagtccc

SEQ ID NO: 751 - DNA, 421 bp, Homo sapiens
  misc_feature (1)...(421): n=a,t,g or c
ttttntgtnaaatcatactttattctggagcctcttggtcaggcttgattcgcacactccctctgcagtgactccaggaacccctctcacagctcagagcggaagtgaaggctgcagctgccatcttctccgcatagtccgcatcgaagcgctcattctgcgccacggtgaaggtggtcttccagtccccagccatgcctttcctcatgaagggggagatgctgtggtccatgaactcccggcggacggtggtgtagttggtcatagggttcttcttcatctccttgaacgacgtgtgctcaaccatgaggtccacagtctcctctggcagggagcgccccacaaactccagggatctttttgaatctcccttttgggggttctccttcatgtcttcatagaagaggtagagaacagggtg

SEQ ID NO: 752 - DNA, 435 bp, Homo sapiens
  misc_feature (1)...(435): n=a,t,g or c
gcatcaagaattantaaatacagtgtatcattattttaaagacatgtttagggaaaaaaccagcttctcttccccttaaagttattggtggtgggagggcaagagaggaagagatggcagctttttaagtgaaattttaatcttatctatcttttgttcattttgagtccccaaataaaatatttctgtactttaatttcttaatcactattgtcagcttgggttgctacacatttaattacaatataaagttgacattgagggatgaaggaaacttaattatacttttccttatttctatttaaccaataaggattttaataggcaaattaggaacaaggattttaccctcccttaataactaaggggttagggtaaggtgggaatttggtatccaggtaacncggggtttcnggattcnggggtgtacccggt

SEQ ID NO: 753 - DNA, 431 bp, Homo sapiens
  misc_feature (1)...(431): n=a,t,g or c
acttccaagatnaacatttttctgtttattcttagaatgtgaattttttttttcaactcagggccaagtacaaacttttgatttttgaaattttttcaactcagggccaagtacaatcttttgatttaaaaattttttttcatgaacaaaccatcagtagttattaaggagcccaagaaataggagatgtgaaagcaggatttctttgtgtttcctttgaatgttgttattttgagtattatcattatcagggtaggagggaaggaaagggtagggctggggaaggtagggtccttatggatatcttgactatgggatccccaggatttacatttcacctggtcacagnggcacacataatttaggataaacatgttcaaggaatggacataaacagaggggtaaacacaggggggctttacatttggggg

SEQ ID NO: 754 - DNA, 348 bp, Homo sapiens
  misc_feature (1)...(348): n=a,t,g or c
nctttttaataatttcagaataaagtctcatttcagtgcagtgggctgggtggtgggggagagggttgaaagccccacttgggtccccgagggtccattgagccctctcaggccagctccaggaatcctgggcctgggtcacagagcagagttgcttgcagggtcctagtggccatcgggctggggcaggacatcatctctcagagggtcagaggctcagagctgggtgcagctcagcaggtcacggccctccaccagctctgggttctcccgcatcatgtgggtgggctgctttttcccccaccaggggcctnagctccagcagctnggtggggtnagcttagcaac

SEQ ID NO: 755 - DNA, 424 bp, Homo sapiens
  misc_feature (1)...(424): n=a,t,g or c
ttttttttttactatcttcaaatttgttttatttcttgttcataattaacagtgcaaagnaattacagcctttaccacttatgcagagataacgaatcaaatttcaaagcataataggtatgttactacctttttacaaaaccatgaaaagcaaaggatttatgcctacactaggtgaagaagccacactgttatatgttatgctaggatgtgtatgccaggggatcaagtgtgctacaaggccaagagcaaagacctgcaattactccaaatgatagccaagtccttcttcgggcatctttatggcatttacctaaattatgcccgaggctctgtggtgtgtgtgtgtgtgcacggtgtncatatatggtttaaggggttcaaaagggatttgggggcccagttgggggttcatttgctaggg

SEQ ID NO: 756 - DNA, 301 bp, Homo sapiens
  misc_feature (1)...(301): n=a,t,g or c
tttttttttttaattttattaagtacacactttaataacgactataaaggaaatattttacagccatagagatcaataactttccatgcggaaataaaaaattcattgctcaataacattattgaggcaagtgaagaaagattactctcttgtcaatctgaaatgttaattttttcagtgcaaaaccagttataaaatatttaaactcaatatttaaaaataaaangtggnnccaattcagcaatgttcaagttctaaatttcataaaacaaatcattacatacattttatagtaaaatac

SEQ ID NO: 757 - DNA, 266 bp, Homo sapiens
  misc_feature (1)...(266): n=a,t,g or c
tttttttttttttttttttttcttnaccaagactgtttttatttaaaatatacttggaataggtgaatattaatctaagcattttcctatcacttttaaaattttatactatgtactttgtattaaatagtacagtagtttcagtaagacatgtaaaatttgccattttaaccaccttaangtgtacaattcagngacatttattatatttacaatgttgtgcaaccatcaccactaattcatcaaattttaataatcttttaatt

SEQ ID NO: 758 - DNA, 345 bp, Homo sapiens
ttttttttcctaaggctctacttcaaagtgctggctattcaaccaactaatctgaataggtatttggatggtgaggtaaaagctattttaaggtctgttctcatctcactttaataaggtgaaaaaaattgccatatgtactaaaaatagttcactgttctgaaactcaatgcctgtttgccaaaacaatattaatgatgcatattctatgcattttttccccaaatatgggcatctgccgtgcacaaaattcaggaatgggaaaccacgagatatttgaaataacaccatcctctttacatgggttaaaaaagtcaaatggaatccagttacttttaattaaaa

SEQ ID NO: 759 - DNA, 382 bp, Homo sapiens
ttttttttaaagaaagtttactatgtgtaatgcaaggcacttatgtctctgcttaaagctacaagggaaaaaatgacaagcccagtttttttcaagggaaatattttttctctgtgaaaggtcagtagtaaaagagctagtttaaagtcatggagtttttgccaaaaaccatgtctcgaggttttatgcatttctaatggctttgcccataggagagatacccagagtggacaaacagaggctaaggaaaaaaatgctgttcatttagatcagaataacctcgctccaatctgggaaaccactcaaatgacacatacaagtctgtatgaaaaggcaaaacaaactcctgggtgatatgcagttattccattcaacatgttta

SEQ ID NO: 760 - DNA, 356 bp, Homo sapiens
gatggagaaaattttatttatgtaattttcatctgtagagatgcttctgtcctcatctttatatttgtctccctcttctcattgaactgcaaaattcctgaaggatgagacctgggatgtttaatgcaaaccgtacattctcagcagagcacaagtatcaaagggacattggatatattttaataatgatctaacacaagcaaaaataaccactgaaaatataaaactcaacaagagacataagaaaaaagcagacagaaaacaaaaaaaattcttattttaggaatgatgctatatgtaacttgtaaaatatttaagtttttatacatgaggttatattgggtttccttatttaa

SEQ ID NO: 761 - DNA, 444 bp, Homo sapiens
  misc_feature (1)...(444): n=a,t,g or c
aaagattcccnnnntttttatttctggaactgtacaccaggtattaaagtacaacaaatacaaaataatgctcaaaaaaatcagtgtttatgtacaaatattaaaatcaatgcaatagcaacttcctcttgaacatctgatactgaaacttgttctgattgtcactaatttatctcatactcacagggtacttatttcaaactgggacaattggaatcactggtcatctaagaggaatattaatatctaccatatttaacaataaaactaatagtttcctccatttagtgaaaaaattagggaactttttaaaaaacataggtaacgtcaatattttattaaattatttcaatttccntttgtgggccatgtgctttggaaactcggggcaaacattctccntgggnggtcgggttntttgttaggttacttcnagttggattt

SEQ ID NO: 762 - DNA, 368 bp, Homo sapiens
  misc_feature (1)...(368): n=a,t,g or c
caagggctggaattnaaattattgtcacagagcacaggagagaccgcttgggtctcaatgaaggtttgcttttcctcttctccaggggaagctactgcaagaaggcccaccagccaggctaggtcaaatggggttggggccacaacatgatagttaaacccataaacacagacttgattcgntcccagcttcacgacttcttagctgtgtgaccttaggtaagtctgttaacctctctcagccttggctttgtggagtggagtgaagagcagggcctgcttcactggggtnttatcaggatggagggggacaaggcctntgaaagtntttagcacagcgcctgggcagatcgtgaccagtcacggagt

SEQ ID NO: 763 - DNA, 261 bp, Homo sapiens
  misc_feature (1)...(261): n=a,t,g or c
agtannataccacagagaatagttgggatgaaaggcatccagcccctgcttcctttaagatggcctctaggcaggtgggtgttctgtaagcctggcaaaaattctggagccaatctctggcaaggctgagtgccaggcggggcctagggacccagggtcggtgcttaatgcctcccgcccattggaaattactgacctccaaatatatatatatatatgttttttaatttaaaggggaagtacactgcacaccttcctcca

SEQ ID NO: 764 - DNA, 691 bp, Homo sapiens
gacccctcacactcacctagccaccatggacatcgccatccaccacccctggatccgccgccccttctttcctttccactcccccagccgcctctttgaccagttcttcggagagcacctgttggagtctgatcttttcccgacgtctacttccctgagtcccttctaccttcggccaccctccttcctgcgggcacccagctggtttgacactggactctcagagatgcgcctggagaaggacaggttctctgtcaacctggatgtgaagcacttctccccagaggaactcaaagttaaggtgttgggagatgtgattgaggtgcatggaaaacatgaagagcgccaggatgaacatggtttcatctccagggagttccacaggaaataccggatcccagctgatgtagaccctctcaccattacttcatccctgtcatctgatggggtcctcactgtgaatggaccaaggaaacaggtctctggccctgagcgcaccattcccatcacccgtgaagagaagcctgctgtcaccgcagcccccaagaaatagatgccctttcttgaattgcattttttaaaacaagaaagtttccccaccagtgaatgaaagtcttgtgactagtgctgaagcttattaatgctaagggcaggcccaaattatcaagctaataaaatatcattcagcaac

SEQ ID NO: 765 - DNA, 2704 bp, Homo sapiens
gcttagtgtaaccagcggcgtatattttttaggcgccttttcgaaaacctagtagttaatattcatttgtttaaatcttattttatttttaagctcaaactgcttaagaataccttaattccttaaagtgaaataattttttgcaaaggggtttcctcgatttggagctttttttttcttccaccgtcatttctaactcttaaaaccaactcagttccatcatggtgatgttcaagaagatcaagtcttttgaggtggtctttaacgaccctgaaaaggtgtacggcagtggcgagagggtggctggccgggtgatagtggaggtgtgtgaagttactcgtgtcaaagccgttaggatcctggcttgcggagtggctaaagtgctttggatgcagggatcccagcagtgcaaacagacttcggagtacctgcgctatgaagacacgcttcttctggaagaccagccaacaggtgagaatgagatggtgatcatgagacctggaaacaaatatgagtacaagttcggctttgagcttcctcaggggcctctgggaacatccttcaaaggaaaatatgggtgtgtagactactgggtgaaggcttttcttgaccgcccgagccagccaactcaagagacaaagaaaaactttgaagtagtggatctggtggatgtcaatacccctgatttaatggcacctgtgtctgctaaaaaagaaaagaaagtttcctgcatgttcattcctgatgggcgggtgtctgtctctgctcgaattgacagaaaaggattctgtgaaggtgatgagatttccatccatgctgactttgagaatacatgttcccgaattgtggtccccaaagctgccattgtggcccgccacacttaccttgccaatggccagaccaaggtgctgactcagaagttgtcatcagtcagaggcaatcatattatctcagggacatgcgcatcatggcgtggcaagagccttcgggttcagaagatcaggccttctatcctgggctgcaacatccttcgagttgaatattccttactgatctatgttagcgttcctggatccaagaaggtcatccttgacctgcccctggtaattggcagcagatcaggtctaagcagcagaacatccagcatggccagccgaaccagctctgagatgagttgggtagatctgaacatccctgataccccagaagctcctccctgctatatggatgtcattcctgaagatcaccgattggagagcccaacaactcctctgctagatgacatggatggctctcaagacagccctatctttatgtatgcccctgagttcaagttcatgccaccaccgacttatactgaggtggatccctgcatcctcaacaacaatgtgcagtgagcatgtggaagaaaagaagcagctttacctacttgtttctttttgtctctcttcctggacactcactttttcagagactcaacagtctcgtcaatggagtgtgggtccaccttagcctctgacttcctaatgtaggaggtggtcagcaggcaatctcctgggccttaaaggatgcggactcatcctcagccagcgcccatgttgtgatacaggggtgtttgttggatgggtttaaaaataactagaaaaactcaggcccatccattttctcagatctccttgaaaattgaggccttttcgatagtttcgggtcaggtaaaaatggcctcctggcgtaagcttttcaaggttttttggaggctttttgtaaattgtgataggaactttggaccttgaacttacgtatcatgtggagaagagccaatttaacaaactaggaagatgaaaagggaaattgtggccaaaactttgggaaaaggaggttcttaaaatcagtgtttcccctttgtgcacttgtagaaaaaaaagaaaaaccttctagagctgatttgatggacaatggagagagctttccctgtgattataaaaaaggaagctagctgctctacggtcatctttgcttagagtatactttaacctggcttttaaagcagtagtaactgccccaccaaaggtcttaaaagccatttttggagcctattgcactgtgttctcctactgcaaatattttcatatgggaggatggttttctcttcatgtaagtccttggaattgattctaaggtgatgttcttagcactttaattcctgtcaaattttttgttctccccttctgccatcttaaatgtaagctgaaactggtctactgtgtctctagggttaagccaaaagacaaaaaaaattttactacttttgagattgccccaatgtacagaattatataattctaacgcttaaatcatgtgaaagggttgctgctgtcagccttgcccactgtgacttcaaacccaaggaggaactcttgatcaagatgcccaaccctgtgatcagaacctccaaatactgccatgagaaactagagggcaggtgttcataaaagccctttgaacccccttcctgccctgtgttaggagatagggatattggcccctcactgcagctgccagcacttggtcagtcactctcagccatagcactttgttcactgtcctgtgtcagagcactgagctccacccttttctgagagttattacagccagaaagtgtgggctgaagatggttggtttcatgtgggggtattatgtaccc

SEQ ID NO: 766 - DNA, 408 bp, Homo sapiens
  misc_feature (1)...(408): n=a,t,g or c
caaaaaaaataaggtgtctttattgtnttggatgcaaatatagtttaaaaaatgcattgtagtgttgantacagctggtggaaacgngctttttgacagcngngcaatcagaggggtgtactcagggtgacgtggaccggagggggcctctggcaaaccagactcttctctggtttgtncttcagaccacgaggtggaaccatctcttcaaaggagccctgccaccatcaccaaagctcacaccagaaaaaaccgccatttacacaacaaactgaacctgaaaaaggaacggaacatggtgcttccgccgtgaacaaaatcagcaagtgaatccgttttcctttcccgggcttttcgnaaaagattcggctagaggaaaaggggggcactttggggcagcccntaggg

SEQ ID NO: 767 - DNA, 281 bp, Homo sapiens
  misc_feature (1)...(281): n=a,t,g or c
agtgtaataattttattaataaaacgaacccatagggttcaaacaagcatacaaagtaattcccttccctgtgggttaaattgttacatttttaataataaaactaaganagctttcatagttaacttaccaaaaacataacgcttgcctattgtttcttactgtgcaaaacaaaaccaaagttttgcccacaganggnttttgtgcaccaaancatgcacatttncaatttcaaaatttctgcatcaaaatgnaaattccaaggccacgtttttgttttt

SEQ ID NO: 768 - DNA, 339 bp, Homo sapiens
  misc_feature (1)...(339): n=a,t,g or c
tttaaaaatatgatcattctttattgttaattggtaatattttctcatacattaggtaaatgtcaagctttgggtctctggagtataactttttgtaacattagccattatttggtaacagaatttaaggatgatggaatgatggaaggtattacatntttctaaaacttaattaagctctaggtcagataacaatggagtaaagtgatacctgcgtttttttccccagtgtaatcttaatttactattgtattttncacttaaaattttgtagggaaaaaagttttcaagggaacactaagattaaattgactaggttcaaatatgcttccccaatga

SEQ ID NO: 769 - DNA, 370 bp, Homo sapiens
  misc_feature (1)...(370): n=a,t,g or c
aagagtttaacacaatttattttatgcttaaataatcgactaggtcatccagtgtatggtttttcatacatatgtcattagagctatgngtcaatgaatgctgattttatgngaatataatcaacaaattaaagantttcaccaaaacccaaataaaaatgccctttaaaacacagcagccttattaacctaatatgacactgctagaatggttacaaatgattggcttactgaaaggggtctacatcttntagccagtacacaatacagtaataattttncagngggctgccattctactagctaagggtttctgntcagnccnttttaaatacccccgactggggccntttatgngcaccatncacct

SEQ ID NO: 770 - DNA, 367 bp, Homo sapiens
  misc_feature (1)...(367): n=a,t,g or c
ccatgttaagaatattttatttgttttttgagattacatagtcattattgctgatctaatacaatcacttagacataaagatttccaagaacttctcagaaatggtgatctttagaagtgttattcctttcagtaagatgacaganctagatgattacgtatatagatatatagatatatatatatatatgtatatatagngtttagaacctgtccacatataatttgctggtgttgcctattttccttccgtaattttccnttattgaaaaagcttaatgcaacaatgcattttgattcctttttaaaaaccacgggcaaagttaattttgagaaaaccacaggngcagcaatatcagatctgttt

SEQ ID NO: 771 - DNA, 163 bp, Homo sapiens
ttttttttttatttttttttactgttgaccatgtagttttatttcatcagtactcccatttttaatggattcaggcagcaccccagagtacaggactgagttcctaggggtggcctgacccagcagctgtcttcttttccaggaggaaaaagctttttattaa

SEQ ID NO: 772 - DNA, 413 bp, Homo sapiens
  misc_feature (1)...(413): n=a,t,g or c
tataatagctaccatttattgagcacctactttgtgccaggcantttacatacatttgtgcttataattcttacaacaacctcgggaggtaggcattattatcaccatttgacatatgagaaaacagaggcttagcaaggttaagcggcttgttcaaggtcacagagctggtagataagtgatagaatcagcacttgagttgtgcatctgtgagggccccaaagctttcatcaggcattttccacactgagaaaataaagaaggtagaggagtgggtgtattagtctgttttcacactgctgataaagacataccccgagactggggtaatttatggaagganaaaggagggttttaatggaactcacagttccctgtgggctggggagggcctcaccaatcatgggtgggaa

SEQ ID NO: 773 - DNA, 409 bp, Homo sapiens
  misc_feature (1)...(409): n=a,t,g or c
cagcttagcttaagatatttattcaatgctctcacatttggcctctgtgacccagaaaagcggtagagcagggtaggagcacatgatgcatccttcagccactgcaacctccagagggaccaggtcttcttcaggaaatcttcgttcctggtggatgactgatcagccataacatggggagaagtcctgcgctctccatttctccatcgctggcttctcctgggagtcatgccaatcattggtctggtccccgtcaaagtttccacaggccccacacagtttcccagcatgggtcattgctgacaatcacagccaccttcccattgggctccaagccacnacctggggacccctgccttctggcggganttagcaggggagccattcagggtgttacggacttcacggn

SEQ ID NO: 774 - DNA, 281 bp, Homo sapiens
  misc_feature (1)...(281): n=a,t,g or c
tcaggatttaaccatggtttattgcagacctattgtgtgccaggcatgagccangtgctcccacaaacagcgtctccaggtacgagaagtgtaatttcgaccctggaacaccttcctgcactcagacagaagcatgtgcagactgctctcagcaacgccacctccttcactccctggccattgggccccttctctctacctgtcccctgtcactccacttcctgccccaggncttctcttagggattttccagggctttgggggagctgctgctttcagtt

SEQ ID NO: 775 - DNA, 298 bp, Homo sapiens
taaagtttatttcatttttaataacaattagaggacaaaatgtttaaaatttgcagtttaaaacatgcacattcacaaaaggccaatgacacataacactgcatagaaataatattactcaattttaataactataaaacacagtgcatcaaacatcaagataaacaaacctgagaaaactactataaccacagattcaatactctccactcatgcagcttcacaatttctacagcagtttcagcaggaatggtttttcagggagctgaaaatactactttatctttaacgcaaaact

SEQ ID NO: 776 - DNA, 385 bp, Homo sapiens
  misc_feature (1)...(385): n=a,t,g or c
cagctcacaagacagttttattgaattagttgcatgcagganaattctgttcttccatgagcagcagagtcgagtgttagagtgcaggnccagagcggggagaggctggnggagttggggnctggagntggggctggttacttggtgacgtgcagantctctctggggggctgcagctcatcttggggggagctggactcagatgcccccgtangtgcaaaagcaacatccacatctcactcctcccggtgctttttgcggtattcctgcagcgtttctccgccacggtctccataaatttagggttcttcctgggagacttctacagggaccgtcacagtgatgggatcagagtcaaagagcttcacgaccacctcagtgacac

SEQ ID NO: 777 - DNA, 244 bp, Homo sapiens
  misc_feature (1)...(244): n=a,t,g or c
ntttttttttttttcaagtcaaaactgttttattgtcngtttacatatttaatagaaaaaggaatgtagcaaatgctcagggttgtatgaaaaaaaaatccaggtttgtgcaggttgctctgtttacatctgggagcagggctgtccccacatcaggcacagcagctgcacttctccgacgcccctttgcagacgcagccctgggacacttggcacagccatggnagaccaggagcagcagctc

SEQ ID NO: 778 - DNA, 338 bp, Homo sapiens
  misc_feature (1)...(338): n=a,t,g or c
ggtgaattattgatttattgcacatcaggagaaacacaagattactgctataataaattcactcttacatgctttagaaaaatcagtaaaaatagaaaacatggtaacanttaaagtgaaaaanttggggtcattaaagaatgtctgactgattagcttgcagtttttgagacggctgagaactaccatcaatgagatcaccttaaacaaacactcttaatgacttggaaaaagtccccntcccaaagtcaactntagggnattcaatattgtgatatttaactggaatttaaggttatggtttaaaccccattttattgaggtaggngggagggatt

SEQ ID NO: 779 - DNA, 465 bp, Homo sapiens
  misc_feature (1)...(465): n=a,t,g or c
ttttaaaggnnnnaatgtgactattttaattattttggtggcagggagttggttttacatcacccaaaaaaaaaaaaaaagccctggtttcaaattcattggtaataaatatgctaactttctgaatcaaaatggagagcctctcaagaaaaagagctatgcagtcagcaatgacttaaattagtcaggatagcaggcatctggggttaaggctgtttccaccattttggtctcaccaccatatacgngtgggaccacagctgtgtagcacttgtttcngtcataagtntagcaggtctctgtagcactgtcttcatcacagatattgctctggggtagcagtaactatctgattatcccagctccacttctgtagggncacattttttacagaggtcagacaaatgggtacacaaatctggttccccaatgggtnaggtngggtccagagntattctccccgtt

SEQ ID NO: 780 - DNA, 232 bp, Homo sapiens
  misc_feature (1)...(232): n=a,t,g or c
ttttatcaactgtnaattgatataattataattggnatgcaatatgtcttacaacaaatgtggatacaatgacatcaaatatcaaagaattttcccacctttccatctttaaatgacttcagctaacttaccccaagngaaaaatctggcattganctcttggntagcattattaccaatatcaactagcactattaaantcaaagttgaaatgggacattcntttgccnaa

SEQ ID NO: 781 - DNA, 3345 bp, Homo sapiens
gaattccgtctcgaccactgaatggaagaaaaggacttttaaccaccattttgtgacttacagaaaggaatttgaataaagaaaactatgatacttcaggcccatcttcactccctgtgtcttcttatgctttatttggcaactggatatggccaagaggggaagtttagtggacccctgaaacccatgacattttctatttatgaaggccaagaaccgagtcaaattatattccagtttaaggccaatcctcctgctgtgacttttgaactaactggggagacagacaacatatttgtgatagaacgggagggacttctgtattacaacagagccttggacagggaaacaagatctactcacaatctccaggttgcagccctggacgctaatggaattatagtggagggtccagtccctatcaccatagaagtgaaggacatcaacgacaatcgacccacgtttctccagtcaaagtacgaaggctcagtaaggcagaactctcgcccaggaaagcccttcttgtatgtcaatgccacagacctggatgatccggccactcccaatggccagctttattaccagattgtcatccagcttcccatgatcaacaatgtcatgtactttcagatcaacaacaaaacgggagccatctctcttacccgagagggatctcaggaattgaatcctgctaagaatccttcctataatctggtgatctcagtgaaggacatgggaggccagagtgagaattccttcagtgataccacatctgtggatatcatagtgacagagaatatttggaaagcaccaaaacctgtggagatggtggaaaactcaactgatcctcaccccatcaaaatcactcaggtgcggtggaatgatcccggtgcacaatattccttagttgacaaagagaagctgccaagattcccattttcaattgaccaggaaggagatatttacgtgactcagcccttggaccgagaagaaaaggatgcatatgttttttatgcagttgcaaaggatgagtacggaaaaccactttcatatccgctggaaattcatgtaaaagttaaagatattaatgataatccacctacatgtccgtcaccagtaaccgtatttgaggtccaggagaatgaacgactgggtaacagtatcgggacccttactgcacatgacagggatgaagaaaatactgccaacagttttctaaactacaggattgtggagcaaactcccaaacttcccatggatggactcttcctaatccaaacctatgctggaatgttacagttagctaaacagtccttgaagaagcaagatactcctcagtacaacttaacgatagaggtgtctgacaaagatttcaagaccctttgttttgtgcaaatcaacgttattgatatcaatgatcagatccccatctttgaaaaatcagattatggaaacctgactcttgctgaagacacaaacattgggtccaccatcttaaccatccaggccactgatgctgatgagccatttactgggagttctaaaattctgtatcatatcataaagggagacagtgagggacgcctgggggttgacacagatccccataccaacaccggatatgtcataattaaaaagcctcttgattttgaaacagcagctgtttccaacattgtgttcaaagcagaaaatcctgagcctctagtgtttggtgtgaagtacaatgcaagttcttttgccaagttcacgcttattgtgacagatgtgaatgaagcacctcaattttcccaacacgtattccaagcgaaagtcagtgaggatgtagctataggcactaaagtgggcaatgtgactgccaaggatccagaaggtctggacataagctattcactgaggggagacacaagaggttggcttaaaattgaccacgtgactggtgagatctttagtgtggctccattggacagagaagccggaagtccatatcgggtacaagtggtggccacagaagtaggggggtcttccttaagctctgtgtcagagttccacctgatccttatggatgtgaatgacaaccctcccaggctagccaaggactacacgggcttgttcttctgccatcccctcagtgcacctggaagtctcattttcgaggctactgatgatgatcagcacttatttcggggtccccattttacattttccctcggcagtggaagcttacaaaacgactgggaagtttccaaaatcaatggtactcatgcccgactgtctaccaggcacacagactttgaggagagggcgtatgtcgtcttgatccgcatcaatgatgggggtcggccacccttggaaggcattgtttctttaccagttacattctgcagttgtgtggaaggaagttgtttccggccagcaggtcaccagactgggatacccactgtgggcatggcagttggtatactgctgaccacccttctggtgattggtataattttagcagttgtgtttatccgcataaagaaggataaaggcaaagataatgttgaaagtgctcaagcatctgaagtcaaacctctgagaagctgaatttgaaaaggaatgtttgaatttatatagcaagtgctatttcagcaacaaccatctcatcctattacttttcatctaacgtgcattataattttttaaacagatattccctcttgtcctttaatatttgctaaatatttcttttttgaggtggagtcttgctctgtcgcccaggctggagtacagtggtgtgatcccagctcactgcaacctccgcctcctgggttcacatgattctcctgcctcagcttcctaagtagctgggtttacaggcacccaccaccatgcccagctaatttttgtatttttaatagagacggggtttcgccatttggccaggctggtcttgaactcctgacgtcaagtgatctgcctgccttggtctcccaatacaggcatgaaccactgcacccacctacttagatatttcatgtgctatagacattagagagatttttcatttttccatgacatttttcctctctgcaaatggcttagctacttgtgtttttcccttttggggcaagacagactcattaaatattctgtacattttttctttatcaaggagatatatcagtgttgtctcatagaactgcctggattccatttatgttttttctgattccatcctgtgtccccttcatccttgactcctttggtatttcactgaatttcaaacatttgtcagagaagaaaaaagtgaggactcaggaaaaataaataaataaaagaacagccttttgcggccgcgaattc

SEQ ID NO: 782 - DNA, 2441 bp, Homo sapiens
tctgattgacttcaagaaggagtcagagatcagcttaagggcaaaggctggaagcagagcgaactgggagcagagcacacagagccgtggagcgagagatgccggccctgggctgggccgtggctgccatcctgatgctgcagacggccatggcggagccctccccggggactctgcccaggaaggcaggggtgttttcagacctaagcaaccaagagctgaaggcagtgcacagcttcctctggtccaagaaggagctgaggctgcagccctccagtaccaccaccatggccaagaacaccgtgtttctcatcgagatgctgctgcccaagaagtaccatgtgctgaggtttctggataaaggtgaaaggcatcctgtgcgggaagcccgtgccgtcatcttctttggtgaccaggagcatcccaatgtcaccgagtttgctgtggggcccctgccagggccctgctacatgcgagcactgtcccccaggcctgggtaccagtcctcctgggcatcgaggcccatctccacagcagagtatgccctcctctaccacaccctgcaggaagccaccaagcccctgcatcagttcttcctcaataccacaggcttctcattccaagactgccatgacagatgcctggccttcaccgatgtggccccccggggtgtggcttctggccagcgccgcagttggcttatcatacagcgctatgtagaaggctactttctgcaccccactgggctggagctcctcgtggatcatgggagcacagatgctgggcactgggccgtggagcaggtgtggtacaacgggaagttctatgggagcccagaggaactggctcggaagtatgcagatggagaggtggacgtggtggtcctggaggacccgctgcctgggggcaaggggcatgacagcacagaggagccgcccctcttctcctcccacaagccccgcggggacttccccagccccatccatgtgagcggcccccgcttggtccagccccacggccctcgcttcaggctggagggcaacgctgtgctctacggcggctggagctttgccttccggctgcgctcctccttcgggctgcaggtcctgaacgtgcacttcggcggagagcgcattgcctatgaggtcagcgtgcaagaggcagtggcgctgtatggaggacacacacctgcaggcatgcagaccaagtacctcgatgtcggctggggcctgggcagcgtcactcatgagttagcccccggcatcgactgcccggagaccgccaccttcctggacactttccactactatgatgccgatgacccggtccattatccccgagccctctgcctctttgaaatgcccacaggggtgccccttcggcggcactttaattccaactttaaaggtggcttcaacttctatgcggggctgaagggccaggtgctggtgctgcggacaacttcaactgtctacaattatgattacatttgggactttatcttctaccccaacggggtgatggaggccaagatgcatgccactggctacgtccacgccaccttctacacccccgaggggctgcgccacggcactcgcctgcacacccacctgattggcaacatacacactcacttggtgcactaccgcgtagacctggatgtggcaggcaccaagaacagcttccagacactgcagatgaagctagaaaacatcaccaacccctggagcccaagacaccgcgtggtccagccaactctggagcagacgcagtactcctgggagcgccaggcggccttccgcttcaaaaggaagctgcctaagtacctgctctttaccagcccccaggagaacccctggggccacaagcgcagctaccgcctgcagatccactccatggccgaccaggtgctgcccccaggctggcaggaggagcaggccatcacctgggcaaggtaccccctggcagtgaccaagtaccgggagtcggagctgtgcagcagcagcatctaccaccagaacgacccctggcacccgcccgtggtctttgagcagtttcttcacaacaacgagaacattgaaaatgaggacctggtggcctgggtgacggtgggcttcctgcacatcccccactcagaggacattcccaacacagccacacctgggaactccgtgggcttcctgctccggccattcaacttcttcccagaggacccctccctggcatccagagacactgtgatcgtgtggcctcgggacaacggccccaactacgtccagcgctggatccctgaggacagggactgctcgatgcctcccccttttagctacaatgggacctatagacctgtgtgaccagcccccagttcctcccccagttcctcccaggaagcccaggagcctcactggggcagacaataaaccctcagagcctcaaaaaaa

SEQ ID NO: 783 - DNA, 2280 bp, Homo sapiens; identical to SEQ ID NO: 233

SEQ ID NO: 784 - DNA, 1897 bp, Homo sapiens
gacgagagaaagcgagtgtccctctcgcgccccaggccggtgtacccccgcactccgcgccccggcctagaagctctctctccccgctccccggcccggcccccgccccgccccgccccagcccgctggcgccatggagcgctggccttggccgtcgggcggcgcctggctgctcgtggctgcccgcgcgctgctgcagctgctgcgctcagacctgcgtctgggccgcccgctgctggcggcgctggcgctgctggccgcgctcgactggctgtgccagcgcctgctgcccccgccggccgcactcgccgtgctggccgccgccggctggatcgcgttgtcccgcctggcgcgcccgcagcgcctgccggtggccactcgcgcggtgctcatcaccggctgtgactctggttttggcaaggagacggccaagaaactggactccatgggcttcacggtgctggccaccgtattggagttgaacagccccggtgccatcgagctgcgtacctgctgctcccctcgcctaaggctgctgcagatggacctgaccaaaccaggagacattagccgcgtgctagagttcaccaaggcccacaccaccagcaccggcctgtggggcctcgtcaacaacgcaggccacaatgaagtagttgctgatgcggagctgtctccagtggccactttccgtagctgcatggaggtgaatttctttggcgcgctcgagctgaccaagggcctcctgcccctgctgcgcagctcaaggggccgcatcgtgactgtggggagcccagcgggggacatgccatatccgtgcttgggggcctatggaacctccaaagcggccgtggcgctactcatggacacattcagctgtgaactccttccctggggggtcaaggtcagcatcatccagcctggctgcttcaagacagagtcagtgagaaacgtgggtcagtgggaaaagcgcaagcaattgctgctggccaacctgcctcaagagctgctgcaggcctacggcaaggactacatcgagcacttgcatgggcagttcctgcactcgctacgcctggccatgtccgacctcaccccagttgtagatgccatcacagatgcgctgctggcagctcggccccgccgccgctattaccccggccagggcctggggctcatgtacttcatccactactacctgcctgaaggcctgcggcgccgcttcctgcaggccttcttcatcagtcactgtctgcctcgagcactgcagcctggccagcctggcactaccccaccacaggacgcagcccaggacccaaacctgagccccggcccttccccagcagtggctcggtgagccatgtgcacctatggcccagccactgcagcacaggaggctccgtgagcccttggttcctccccgaaaacccccagcattacgatcccccaagtgtcctggaccctggcctaaagaatcccacccccacttcatgcccactgccgatgcccaatccaggcccggtgaggccaaggtttcccagtgagcctctgcgcctctccactgtttcatgagcccaaacaccctcctggcacaacgctctaccctgcagcttggagaactccgctggatggggagtctcatgcaagacttcactgcagcctttcacaggactctgcagatagtgcctctgcaaactaaggagtgactaggtgggttggggaccccctcaggattgtttctcggcaccagtgcctcagtgctgcaattgagggctaaatcccaagtgtctcttgactggctcaagaattagggccccaactacacacccccaagccacagggaagcatgtactgtacttcccaattgccacattttaaataaagacaaatttttatttcttct

SEQ ID NO: 785 - DNA, 1823 bp, Homo sapiens
cccccaatttcccagctgctaaaggaagaggaaggtacctgtgcgtgcacgcagacgggaagggctggggaagcgggaggactgagaaaaccagatcttagcaaagcaatgtctcaagatggtgcttctcagttccaagaagtcattcggcaagagctagaattatctgtgaagaaggaactagaaaaaatactcaccacagcatcatcacatgaatttgagcacaccaaaaaagacctggatggatttcggaagctatttcatagatttttgcaagaaaaggggccttctgtggattggggaaaaatccagagaccccctgaagattcgattcaaccctatgaaaagataaaggccaggggcctgcctgataatatatcttccgtgttgaacaaactagtggtggtgaaactcaatggtggtttgggaaccagcatgggctgcaaaggccctaaaagtctgattggtgtgaggaatgagaatacctttctggatctgactgttcagcaaattgaacatttgaacaaaacctacaatacagatgtccctcttgttttaatgaactcttttaacacggatgaagataccaaaaaaatactacagaagtacaatcattgtcgtgtgaaaatctacactttcaatcaaagcaggtacccgaggattaataaagaatctttacggcctgtagcaaaggacgtgtcttactcaggggaaaatacagaagcttggtaccctccaggtcatggtgatatttacgccagtttctacaactctggattgcttgatacctttataggagaaggcaaagagtatatttttgtgtctaacatagataatctgggtgccacagtggatctgtatattcttaatcatctaatcaacccacccaatggaaaacgctgtgaatttgtcatggaagtcacaaataaaacacgtgcagatgtaaagggcgggacactcactcaatatgaaggcaaactgagactggtggaaattgctcaagtgccaaaagcacatgttgacgagttcaagtctgtatcaaagttcaaaatatttaatacaaacaacctatggatttctcttgcagcagttaaaagactgcaggagcaaaatgccattgacatggaaatcattgtgaatgcaaagactttggatggaggcctgaatgtcattcaattagaaactgcagtaggggctgccatcaaaagctttgagaattctctaggtattaatgtgccaaggagccgttttctgcctgtcaaaaccacatcagatctcttgctggtgatgtcaaacctctatagtcttaatgcaggatctctgacaatgagtgaaaagcgggaatttcctacagtgcccttggttaaattaggcagttcttttacgaaggttcaagattatctaagaagatttgaaagtataccagatatgcttgaattggatcacctcacagtttcaggagatgtgacatttggaaaaaatgtttcattaaagggaacggttatcatcattgcaaatcatggtgacagaattgatatcccacctggagcagtattagagaacaagatagtgtctggaaaccttcgcatcttggaccactgaaatgaaaaatactgtggacacttaaataatgggctagtttcttacaatgaaatgttctctaggatttaggcactaaaaggtactttactatgttactgtaccctgcagtgttgatttttaaaatagagttttctgcagtatgcttttagtctaagaaaagcacagatggtgcaatactttccttctttgaagagatcccaaagttagttactcttaagtgc

SEQ ID NO: 786 - DNA, 1429 bp, Homo sapiens
cagcatggctacgaaatgtgggaattgtggacccggctactccacccctctggaggccatgaaaggacccagggaagagatcgtctacctgccctgcatttaccgaaacacaggcactgaggccccagattatctggccactgtggatgttgaccccaagtctccccagtattgccaggtcatccaccggctgcccatgcccaacctgaaggacgagctgcatcactcaggatggaacacctacagcagctgcttcggtgatagcaccaagtcgcgcaacaagctggtcttgcccagtctcatctcctctcgcatctatgtggtggacgtgggctctgagcccgggccccaaaagctgcacaaggtcattgagcccaaggacatccatgccaagtgcgaactggcctgtctccacaccagccactgcctggccagcggggaagtgatgatcagctccctgggggacgtcaagggcaatggcaaagggggttttgtgctgctggatggggagacgttcgaggtgaaggggacatgggagagacctgggggtgctgcaccgttgggctatgacttctggtaccagcctcgacacaatgtcatgatcagcactgagtgggcagctcccaatgtcttacgagatggctttaaccccgctgatgtggaggctggactgtacgggagccacttatatgtatgggactggcagcgccatgagattgtgcagaccctgtctctaaaagatgggctgatacccttggagatccgcttcctgcacaacccaagtgccacccagggttttgtaggctgtgcctcagctccaaacatccagcgcttctacaaaacgagggaaggtacatggtcagtggagaaggtgatccaggtgccccccaagaaagtgaagggctggctgctgccaggggtgccaggcctgatcaccgacatcctgctctccctggacgaccgcttcctctacttcagcaactggctgcatggggacctgaggcagtatgacatctctgacccacagagaccccgcctcacaggacagctcttcctcggaggcagcattgttaagggaggccctgtgcaagtgctggaggacgaggaactaaagtcccagccagagcccctagtggtcaagggaaaacgggtggctggaggccctcagatgatccagctcagcctggatggcaagcgcctctacatcaccacgtcgctgtacagtgcctgggaaaagcagttttaccctgatctcatcagggaaggctctgtaatgctgcaggttgatgtagacacagtaaaaggagggctgaagttgaaccccaactgcctggtggacttcgggaaggagccccttggcccagccctggctcacgagcttcgctaccctgggggcgattgtagctctgacatctggatttgaaggctc

SEQ ID NO: 787 - DNA, 5926 bp, Homo sapiens; identical to SEQ ID NO: 247

SEQ ID NO: 788 - DNA, 2254 bp, Homo sapiens
caaccatatccaagcctttgcccgaatacatcctatctgccacacatccagcgtgaggtccctccagctacaaggtgggcaccatggcggagaagtttgactgccactactgcagggatcccttgcaggggaagaagtatgtgcaaaaggatggccaccactgctgcctgaaatgctttgacaagttctgtgccaacacctgtgtggaatgccgcaagcccatcggtgcggactccaaggaggtgcactataagaaccgcttctggcatgacacctgcttccgctgtgccaagtgccttcaacccttggccaatgagacctttgtggccaaggacaacaagatcctgtgcaacaagtgcaccactcgggaggacttccccaagtgcaaggggtgcttcaaggccattgtggcaggagatcaaaacgtggagtacaaggggaccgtctggcacaaagactgcttcacctgtagtaactgcaagcaagtcatcgggactggaagcttcttccctaagggggaggacttctactgcgtgacttgccatgagaccaagttggccaagcattgcgtgaagtgcaacaaggccatcacatctggaggaatcacttaccaggatcagccctggcatgccgattgctttgtgtgtgttacctgctctaagaagctggctgggcagcgtttcaccgctgtggaggaccagtattactgcgtggattgctacaagaacttcgtggccaagaagtgtgctggatgcaagaaccccatcactgggtttggtaaaggctccagtgtggtggcctatgaaggacaatcctggcacgactactgcttccactgcaaaaaatgctccgtgaatctggccaacaagcgctttgttttccaccaggagcaagtgtattgtcccgactgtgccaaaaagctgtaaactgacaggggctcctgtcctgtaaaagggcatttgaatctcgttctttgtgtccttactttctgccctataccatcaataggggaagagtggtccttcccttctttaaagttcctcccttccgtcttttctcccattttacagtattactcaaataagggcacacagtgatcatattagcatttagcaaaaagcaaccctgcagcaaagtgaatttctgtccggctgcaatttaaaaatgaaaacttaggtagattgactcttctgcatgtttctcatagagcagaaaagtgctaatcatttagccacttagtgatgtaagcaagaagcataggagataaaacccccactgagatgcctctcatgcctcagctgggacccaccgtgtagacacacgacatgcaagagttgcagcggctgctccaactcactgctcaccctcttctgtgagcaggaaagaaccctactgacatgcatggtttaacttcctcatcagaactctgcccttccttctgttcttttgtgctttcaaataactaacacgaacttccagaaaattaacatttgaacttagctgtaattctaaactgacctttccccgtactaacgtttggtttccccgtgtggcatgttttctgagcgttcctactttaaagcatggaacatgcaggtgatttgggaagtgtagaaagacctgagaaaacgagcctgtttcagaggaacatcgtcacaacgaatacttctggaagcttaacaaaactaaccctgctgtcctttttattgtttttaattaatatttttgttttaattgatagcaaaatagtttatgggtttggaaacttgcatgaaaatattttagccccctcagatgttcctgcagtgctgaaattcatcctacggaagtaaccgcaaaactctagagggggagttgagcaggcgccagggctgtcatcaacatggatatgacatttcacaacagtgactagttgaatcccttgtaacgtagtagttgtctgctctttgtccatgtgttaatgaggactgcaaagtcccttctgttgtgattcccaggacttttcctcaagaggaaatctggatttccacctaccgcttacctgaaatgcaggatcacctacttactgtattctacattattatatgacatagtataatgagacaatatcaaaagtaaacatgtaatgacaatacatactaacattcttgtaggagtggttagagaagctgatgcctcatttctacattctgtcattagctattatcatctaacgtttcagtgtatccttacagaaataaagcagcatatgaat

SEQ ID NO: 789 - DNA, 2717 bp, Homo sapiens
cagggtaacgctgtcttgtggacccgcacttcccacccgagacctctcactgagcccgagccgcgcgcgacatgagccacgggaagggaaccgacatgctcccggagatcgccgccgccgtgggcttcctctccagcctcctgaggacccggggctgcgtgagcgagcagaggcttaaggtcttcagcggggcgctccaggaggcactcacagagcactacaaacaccactggtttcccgaaaagccgtccaagggctccggctaccgctgcattcgcatcaaccacaagatggaccccatcatcagcagggtggccagccagatcggactcagccagccccagctgcaccagctgctgcccagcgagctgaccctgtgggtggacccctatgaggtgtcctaccgcattggggaggacggctccatctgcgtcttgtacgaggaggccccactggccgcctcctgtgggctcctcacctgcaagaaccaagtgctgctgggccggagcagcccctccaagaactacgtgatggcagtctccagctaggcccttccgcccccgccctgggcgccgccgtgctcatgctgccgtgacaacaggccaccacatacctcaacctggggaactgtatttttaaatgaagagctatttatatatattatttttttttaagaaaggaggaaaagaaaccaaaagttttttttaagaaaaaaaatccttcaagggagctgcttggaagtggcctccccaggtgcctttggagagaactgttgcgtgcttgagtctgtgagccagtgtctgcctataggagggggagctgttagggggtagacctagccaaggagaagtgggagacgtttggctagcaccccaggaagatgtgagagggagcaagcaaggttagcaactgtgaacagagaggtcgggatttgccctgggggaggaagagaggccaagttcagagctctctgtctcccccagccagacacctgcatccctggctcctctattactcaggggcattcatgcctggacttaaacaatactatgttatcttttcttttatttttctaatgaggtcctgggcagagagtgaaaaggcctctcctgattcctactgtcctaagctgcttttcttgaaatcatgacttgtttctaattctaccctcaggggcctgtagatgttgctttccagccaggaatctaaagctttgggttttctgagggggggaggagggaactggaggttattggggttaggatggaagggaactctgcacaaaacctttgctttgctagtgctgctttgtgtgtatgtgtggcaaataatttgggggtgatttgcaatgaaattttgggacccaaagagtatccactggggatgttttttggccaaaactcttccttttggaaccacatgaaagtcttgatgctgctgccatgatccctttgagaggtggctcaaaagctacagggaactccaggtcctttattactgccttcttttcaaaagcacaactctcctctaaccctcccctcccccttcccttctggtcgggtcatagagctaccgtattttctaggacaagagttctcagtcactgtgcaatatgccccctgggtcccaggagggtctggaggaaaactggctatcagaacctcctgatgccctggtgggcttagggaaccatctctcctgctctccttgggatgatggctggctagtcagccttgcatgtattccttggctgaatgggagagtgccccatgttctgcaagactacttggtattcttgtagggccgacactaaataaaagccaaaccttgggcactgttttttctccctggtgctcagagcacctgtgggaaaggttgctgtctgtctcagtacaatccaaatttgtcgtagacttgtgcaatatatactgttgtgggttggagaaaagtggaaagctacactgggaagaaactcccttccttcaatttctcagtgacattgatgaggggtcctcaaaagacctcgagtttcccaaaccgaatcaccttaagaaggacagggctagggcatttggccaggatggccaccctcctgctgttgccccttagtgaggaatcttcaccccacttcctctacccccaggttctcctccccacagccagtcccctttcctggatttctaaactgctcaattttgactcaaaggtgctatttaccaaacactctccctacccattcctgccagctctgcctccttttcaactctccacattttgtattgccttcccagacctgcttccagtctttattgctttaaagttcactttgggcccacagacccaagagctaattttctggtttgtgggttgaaacaaagctgtgaatcactgcaggctgtgttcttgcatcttgtctgcaaacaggtccctgcctttttagaagcagcctcatggtctcatgcttaatcttgtctctcttctcttctttatgatgttcactttaaaaacaacaaaacccctgagctggactgttgagcaggcctgtctctcctattaagtaaaaataaatagtagtagtatgtttgtaagctattctgacagaaaagacaaaggttactaattgtatgatagtgtttttatatggaagaatgtacagcttatggacaaatgtacacctttttgttactttaataaaaatgtagtaggataaaaaaaaa

SEQ ID NO: 790 - DNA, 3327 bp, Homo sapiens
cacacctttccaaggacccccaaactctgctccgtgcacgtcaaatgctcctttcccttgtgtccaaccccctacccctctccctaacacccctcttctcaacaagactcagcctctccccgaggtgggtgagcatccttgaggtttcccacccttaactgctgtgtccccggatggagccagagaaatgtggtgggggggccggggcagagtttcaacattgccccccagaaggaggagccagagatggggtctgtccaggaaaacaggatgccggagcccaggagtcgtcagcctagcagttgcctggcctccagatgcctcccaggggagcagatcctagcatgggccccaggggtgaggaagggcctggaaccagaattgtctggaaccctgatctgtaccaactttagggtcaccttccagccctgtggatggcagtggaatcaggacactcccttgaacagtgaatacgattttgccctggtcaacattggacgattagaggctgtgagcggcttgtcccgagtccagctcctccgtccagggtccctgcataaatttatccctgaggagattctgattcatggccgagacttccggctgctcagagttggttttgaggctggaggcctagagcctcaggcttttcaggtgaccatggccattgtccaagccagagctcagagcaatcaagcccaacagtattcggggataaccctgagcaaggctggccagggttctggctccagaaaaccaccaattcctctcatggagacagcggaagactgggagactgagcggaagaagcaggcagccagaggctggagggtcagcacggtcaacgagaggttcgacgtagccaccagcctcccccgttacttctgggtccctaaccgaattctggacagtgaggtcaggagagcatttggccactttcatcagggccgtggaccggtcagtgtgatggttagggtaatggctgtggattagagggtcatgtgggccagggacatcgtggagggaggaacctctgtgaggtcagtgtgggggcaagggtagcgtggagctaggcatttctcccacaatgaccctcttctgccccatgtgaagcgcttgtcctggcatcaccctgggggcagtgatcttctccgctgtggaggcttctatacagccagtgaccctaacaaggaggatatcagagcagtggagttgatgcaccaggctgggcattcagatgttgtcctggtagacactatggatgagctgcccagccttgcagatgtccaacttgcccacctgaggctgagggccctctgcctgcctgattcatctgtagctgaggataaatgctttcagccctggaaggaacacgatggctggactatgtcagggcttgtcttcgaaaggccagtgacatttcagtattagtgacatccagggttcgttctgtaatacttcaaggctccggtgtttctcctcttccttgattgtgtctggcagctcctccagcagtttccagctgattttgaattctctgagtttttccttcttgctcttcatgacagtgtcagggttcctgacacccttaccttcctgagaaataccccctgggagcgcggaaagcagagcggacaggtcagtgacttctatttttgactcgtgtttttttttccattgagatgtactctctgaagtttggtcttgatttgttttatgagaagtgaggtctgtgagtggggagggggagatttattctcattttcaggacgagacttttgccctacatctttcctagaataagaggtgagaatctcatgatttgtctctagatgtgggaggattgtgtgtaaccatcctttttcttgcttcctctgtccagttaaactcctatacacaagtctacaccccaggatactccagcctccagctgggaactcttttaacctgcagctgtctgtctgggactgggatttacgttatagcaatgcacagatactacaattccagaatcctggctatgacccagaacactgtccagattcctggctccctagaccacagccaagcttcatggttcctggaccccccagttttgtgtggctcttctctagaggagcattgacccccctgaatcagctctgtccttggcgggacagtccttccctgctggcagtctcttctcgttggctccctcgacctgctatctcctctgaaagctggctgaccaggaatggggtctcccctcacattggggagcttgccctttacctccagggctgctgctgcctgggtatctgggaccccagatcaggctctggagacgctgctacctgaggggaaggcctgaggtccaggtaagaagggaaaatagactgggagtgggacaagggacttgactctgctgaaccagatgaacaggagctggaaaggcaaggagctgaagcctctgggagtctgggaagtgaagttctactcctcttggcatcaaacaaggtttgggagtgtaggaggtgcgggaaagtgcttgtggcttagattaagtggaatttagggcatagctgaaaggggaaacagaattaaagacaccagaagtagcagagaagcagggggccagagctacaacagtattcttctctgttcctctttgcctcctccccagatgggcctctcatctcccacaatctctggcctccaggatgagctatcccatcttcaggagttattacggaaaggacaccaagaatatctcctgaggatcactccaagaaaagagatccacataccattctcaatcccactgaaattgctggcattctcaaaggcagggcagagggggatctggggtagagggagggttctgtctaatcttttttttttcttttgtatctgcacttgcagcctcagctttcatacttcagcccttaagttcactaagaaggtctgagtttctgctgcagatagtggtgttaactgctccaactcttgtcttgcttagtttctacaaatatttttgcttcttgtcatttgaaggattaagaaacaaaaacaatccagaaattgatcggtttttttaggccaatcccatcccttctggataaccagatgttaaatcatgagatcagagatgctgttcatcagtcccaacaagatggcctagaaatcgcattctcacctcgccttgctgctgctttaattccaagttctatttcttcccttatagttttctatgggaatgaggcggatacaggaaacaccctatctcctctgtatttttgtagtggaatttctatttaaggggctcattaaagcatagtatttatacac

SEQ ID NO: 791 - DNA, 2793 bp, Homo sapiens
ctacccctttgtgagcagtctaggactttgtacacctgttaagtagggagaaggcaggggaggtggctggtttaaggggaacttgagggaagtagggaagactcctcttgggacctttggagtaggtgacacatgagcccagccccagctcacctgccaatccagctgaggagctcacctgccaatccagctgaggctgggcagaggtgggtgagaagagggaaaattgcagggacctccagttgggccaggccagaagctgctgtagctttaaccagacagctcagacctgtctggaggctgccagtgacaggttaggtttagggcagagaagaagcaagaccatggtggggaagatgtggcctgtgttgtggacactctgtgcagtcagggtgaccgtcgatgccatctctgtggaaactccgcaggacgttcttcgggcttcgcagggaaagagtgtcaccctgccctgcacctaccacacttccacctccagtcgagagggacttattcaatgggataagctcctcctcactcatacggaaagggtggtcatctggccgttttcaaacaaaaactacatccatggtgagctttataagaatcgcgtcagcatatccaacaatgctgagcagtccgatgcctccatcaccattgatcagctgaccatggctgacaacggcacctacgagtgttctgtctcgctgatgtcagacctggagggcaacaccaagtcacgtgtccgcctgttggtcctcgtgccaccctccaaaccagaatgcggcatcgagggagagaccataattgggaacaacatccagctgacctgccaatcaaaggagggctcaccaacccctcagtacagctggaagaggtacaacatcctgaatcaggagcagcccctggcccagccagcctcaggtcagcctgtctccctgaagaatatctccacagacacatcgggttactacatctgtacctccagcaatgaggaggggacgcagttctgcaacatcacggtggccgtcagatctccctccatgaacgtggccctgtatgtgggcatcgcggtgggcgtggttgcagccctcattatcattggcatcatcatctactgctgctgctgccgagggaaggacgacaacactgaagacaaggaggatgcaaggccgaaccgggaagcctatgaggagccaccagagcagctaagagaactttccagagagagggaggaggaggatgactacaggcaagaagagcagaggagcactgggcgtgaatccccggaccacctcgaccagtgacaggccagcagcagagggcggcggaggaagggttaggggttcattctcccgcttcctggcctcccttctcctttctaagccctgttctcctgtccctccatcccagacattgatggggacatttcttccccagtgtcagctgtggggaacatggctggcctggtaagggggtccctgtgctgatcctgctgacctcactgtcctgtgaagtaacccctcctggctgtgacacctggtgcgggcctggccctcactcaagaccaggctgcagcctccacttccctcgtagttggcaggagctcctggaagcacagcgctgagcatggggcgctcccactcagaactctccagggaggcgatgccagccttggggggtgggggctgtcctgctcacctgtgtgcccagcacctggaggggcaccaggtggagggtttgcactccacacatctttcttgaatgaatgaaagaataagtgagtatgcttgggccctgcattggcctggcctccagctcccactccctttccaacctcacttcccgtagctgccagtatgttccaaaccctcctgggaaggccacctcccactcctgctgcacaggccctggggagcttttgcccacacactttccatctctgcctgtcaatatcgtacctgtccctccaggcccatctcaaatcacaaggatttctctaaccctatcctaattgtccacatacgtggaaacaatcctgttactctgtcccacgtccaatcatgggccacaaggcacagtcttctgagcgagtgctctcactgtattagagcgccagctccttggggcagggcctgggcctcatggcttttgctttccctgaagccctagtagctggcgcccatcctagtgggcacttaagcttaattggggaaactgctttgattggttgtgccttcccttctctggtctccttgagatgatcgtagacacagggatgattcccacccaaacccacgtattcattcagtgagttaaacacgaattgatttaaagtgaacacacacaagggagcttgcttgcagatggtctgagttcttgtgtcctggtaattcctctccaggccagaataattggcatgtctcctcaacccacatggggttcctggttgttcctgcatcccgatacctcagccctggccctgcccagcccatttgggctctggttttctggtggggctgtcctgctgccctcccacagcctccttctgtttgtcgagcatttcttctactcttgagagctcaggcagcgttagggctgcttaggtctcatggaccagtggctggtctcacccaactgcagtttactattgctatcttttctggatgatcagaaaaataattccataaatctattgtctacttgcgattttttaaaaaatgtatatttttatatatattgttaaatcctttgcttcattccaaatgctttcagtaataataaaattgtgggtgg

SEQ ID NO: 792 - DNA, 372 bp, Homo sapiens
agtcccagcgaacccgcgtgcaacctgtcccgactctagccgcctcttcagcacgccatggatcccaactgctcctgcgccgccggtgactcctgcacctgcgccggttcctgcaaatgcaaagagtgcaaatgcacttcgtgcaagaaaagctgctgctcctgctgccctgtgggctgtgccaagtgtgcccaaggctgcatctgcaaaggggcgtcggacaagtgcagctgctgcgcctgatgctgggacagccccgctcccagatgtaaagaacgcgacttccacaaacctggattttttatgtacaaccctgaccgtgaccgtttgctatattcctttttctatgaaataatgtgaatgataataaaa

SEQ ID NO: 793 - DNA, 3565 bp, Homo sapiens
gcagccgggcggccgcagaagcgcccaggcccgcgcgccacccctctggcgccaccgtggttgagcccgtgacgtttacactcattcataaaacgcttgttataaaagcagtggctgcggcgcctcgtactccaaccgcatctgcagcgagcaactgagaagccaagactgagccggcggccgcggcgcagcgaacgagcagtgaccgtgctcctacccagctctgcttcacagcgcccacctgtctccgcccctcggcccctcgcccggctttgcctaaccgccacgatgatgttctcgggcttcaacgcagactacgaggcgtcatcctcccgctgcagcagcgcgtccccggccggggatagcctctcttactaccactcacccgcagactccttctccagcatgggctcgcctgtcaacgcgcaggtaaggctggcttcccgtcgccgcggggccgggggcttggggtcgcggaggaggagacaccgggcgggacgctccagtagatgagtagggggctcccttgtgcctggagggaggctgccgtggccggagcggtgccggctcgggggctcgggacttgctctgagcgcacgcacgcttgccatagtaagaattggttcccccttcgggaggcaggttcgttctgagcaacctctggtctgcactccaggacggatctctgacattagctggagcagacgtgtcccaagcacaaactcgctaactagagcctggcttcttcggggaggtggcagaaagcggcaatcccccctcccccggcagcctggagcacggaggagggatgagggaggagggtgcagcgggcgggtgtgtaaggcagtttcattgataaaaagcgagttcattctggagactccggagcggcgcctgcgtcagcgcagacgtcagggatatttataacaaaccccctttcaagcaagtgatgctgaagggataacgggaacgcagcggcaggatggaagagacaggcactgcgctgcggaatgcctgggaggaaaagggggagacctttcatccaggatgagggacatttaagatgaaatgtccgtggcaggatcgtttctcttcactgctgcatgcggcactgggaactcgccccacctgtgtccggaacctgctcgctcacgtcggctttccccttctgttttgttctaggacttctgcacggacctggccgtctccagtgccaacttcattcccacggtcactgccatctcgaccagtccggacctgcagtggctggtgcagcccgccctcgtctcctctgtggccccatcgcagaccagagcccctcaccctttcggagtccccgccccctccgctggggcttactccagggctggcgttgtgaagaccatgacaggaggccgagcgcagagcattggcaggaggggcaaggtggaacaggtgaggaactctagcgtactcttcctgggaatgtgggggctgggtgggaagcagccccggagatgcaggagcccagtacagaggatgaagccactgatggggctggctgcacatccgtaactgggagccctggctccaagcccattccatcccaactcagactctgagtctcaccctaagaagtactctcatagtttcttccctaagtttcttaccgcatgctttcagactgggctcttctttgttctcttgctgaggatcttattttaaatgcaagtcacacctattctgcaactgcaggtcagaaatggtttcacagtggggtgccaggaagcagggaagctgcaggagccagttctactggggtgggtgaatggaggtgatggcagacacttttactgaatgtcggtctttttttgtgattattctagttatctccagaagaagaagagaaaaggagaatccgaagggaaaggaataagatggctgcagccaaatgccgcaaccggaggagggagctgactgatacactccaagcggtaggtactctgtgggttgctcctttttaaaacttaagggaaagttggagattgagcataagggcccttgagtaagactgtgtcttatgctttcctttatccctctgtatacaggagacagaccaactagaagatgagaagtctgctttgcagaccgagattgccaacctgctgaaggagaaggaaaaactagagttcatcctggcagctcaccgacctgcctgcaagatccctgatgacctgggcttcccagaagagatgtctgtggcttcccttgatctgactgggggcctgccagaggttgccaccccggagtctgaggaggccttcaccctgcctctcctcaatgaccctgagcccaagccctcagtggaacctgtcaagagcatcagcagcatggagctgaagaccgagccctttgatgacttcctgttcccagcatcatccaggcccagtggctctgagacagcccgctccgtgccagacatggacctatctgggtccttctatgcagcagactgggagcctctgcacagtggctccctggggatggggcccatggccacagagctggagcccctgtgcactccggtggtcacctgtactcccagctgcactgcttacacgtcttccttcgtcttcacctaccccgaggctgactccttccccagctgtgcagctgcccaccgcaagggcagcagcagcaatgagccttcctctgactcgctcagctcacccacgctgctggccctgtgagggggcagggaaggggaggcagccggcacccacaagtgccactgcccgagctggtgcattacagagaggagaaacacatcttccctagagggttcctgtagacctagggaggaccttatctgtgcgtgaaacacaccaggctgtgggcctcaaggacttgaaagcatccatgtgtggactcaagtccttacctcttccggagatgtagcaaaacgcatggagtgtgtattgttcccagtgacacttcagagagctggtagttagtagcatgttgagccaggcctgggtctgtgtctcttttctctttctccttagtcttctcatagcattaactaatctattgggttcattattggaattaacctggtgctggatattttcaaattgtatctagtgcagctgattttaacaataactactgtgttcctggcaatagtgtgttctgattagaaatgaccaatattatactaagaaaagatacgactttattttctggtagatagaaataaatagctatatccatgtactgtagtttttcttcaacatcaatgttcattgtaatgttactgatcatgcattgttgaggtggtctgaatgttctgacattaacagttttccatgaaaacgttttattgtgtttttaatttatttattaagatggattctcagatatttatatttttattttatttttttctaccttgaggtcttttgacatgtggaaagtgaatttgaatgaaaaatttaagcattgtttgcttattgttccaagacattgtcaataaaagcatttaagttgaatgcgaccaaccttgtgctcttttcattctggaagt

SEQ ID NO: 794 - DNA, 421 bp, Homo sapiens
attattagagtaacaatttattagcagacaaaacaaatgaaacctctaaatctcaacacacatacaggatcttacataataaacagcataaaacataagcttctagaagaaaagtatctgctattaaccaactccccctcctttccagtaggctgcaatacattaataactcatcctcatcccataagagggttaagcaatgatttacatggaattacatcaaggcacttgctttaattaaaaaatacagtataaaacatgttcctaaaagtcatcaaccttgaataattaaagaaaaaacaggcagtatacttttttggtgaatagacaagactgagaatttaagttcattcacctgtcaccctgatattgtcttggtttgtgtacaaagttccaaagaagaccaaaaaaagggtaggcc

SEQ ID NO: 795 - DNA, 698 bp, Homo sapiens
  misc_feature (1)...(698): n=a,t,g or c
gctcttgaacccagaaggcgaaggttgcagtgagccgagatcatgccattgtactctagcctgggtgacgggagcaagactccgtctcaaaaaaaaaaaaaaaaaaaaaaagaagtagagacagggagacggggtctcactgtgttgcctaggccggtcttgaactcctgggctcaagtgattctcccaccttgacctcctaaattgttgggattacaggtgtgagacagtgcacctggccgaaatagctcaagtttctgaaaaacaaatctgaatctatttgttattcttagcgtcactggtctggctttcagaattaacatacaaggttgccacacctagttctggcccagctttatggtcttttattccagtattccaccaaagtttgtttttcctgcattccagttctcaagtcttaaggataaagatngtacttgacagtttagtatatccataaaactatttgaaggtggttaaggttccttgggttcaattttccttaaaactttgcctgaatatnggaagattgtagggcaatgaaaaggtctactaaattaggaaaaccttgaaataaattagggatccnaggtaagagcccctaaacatcaagcaatctgggagtctgtaagaaatnaatattttttggataatcctaacnaatccacccngttggaagnggatccttgtccttgcaa

SEQ ID NO: 796 - DNA, 472 bp, Homo sapiens
  misc_feature (1)...(472): n=a,t,g or c
nnnnggnnnnnttnnnntaactggataaaacaatggctggttctagccctgagtgacagtcttaaggctagatccttcccatagtatcatctgtcctctggaatgactctcctgtccctaaaggggttaagagagagatcacctagaaatccctctggacacttgtgggttctttagggtttgagtttcttcttccccttgagcttcagagaggagagttggcatggttaaatctgaatggttacctcactgctgaaaacccagaggggcgtggcacactcgcttgtgtggaaaagcctctaaatgcatcccttcctttctttcctgcttcctttggcttacaattgaagcaggccgtggtaccatcacagtatgcagagacttcctcanctttcatatctagggaccacccccgatgcattggtgagggtgggcacttattaatgtctgntattgttaagccatccagncg

SEQ ID NO: 797 - DNA, 398 bp, Homo sapiens
caaagtttacaataatttattattgttgcatgacatttgccagtaaaataaattatagaaactatagagtctttataaactattttgtatatcatattcacttcctaatgcttactgcagtaactgtatgaaatttaattagattacgttttagcattagtcagaagatttaaaaaatatgtaaaatgttttcacagtactttggatttataaaagaccccattattttaacttttgtgcaacctgtttgaaatgtataaaaaaccttttacaaaccaaaaggtggcgtaaggttttactgagttgctgaagacatcttactttcttgaatttctacttaaacatccatgtggtgcactttttcaggcagtgtaataagtggcaaataaataatcaat

SEQ ID NO: 798 - DNA, 384 bp, Homo sapiens
ccaaaataacttttattactatataaaagaagtcaagaaaaaatagatgcatatttttcctacaaaattataaaatattcaggatagttaatattttttccataaatgcgctaagataaaaagatagaaatctttttcacttaaggttttcgagtaccttgtaggaattaaagaacaataatgttctttcttctacattttcctaaagacatagcagttacagtttcctgctggagttatctaaaaaaggacataccaagataaattttctatcatattgaaataaaattagcataaagctttacttctgtctttgtgcttttagattggcaactgtggtcaatcagtgctgcactggaatttccaactcagcaggggaaagaa

SEQ ID NO: 799 - DNA, 465 bp, Homo sapiens
  misc_feature (1)...(465): n=a,t,g or c
tttttcaactgcaataaaatcagtgcagttcagaaaactcgacctttcagtatccgagaaggcagctttgtaagcactttctgttcgaggaactttgttaagcagctgaggggaatctgacccagctcctgtgttgtctggtgtagacagggcaccagactgggagtcaagtggcctgggtgcttcttcactgccaccagcacttcctaataatggcaaatttacattttgttacggtgctcacagcttacaaaacacatacatgtgcatcatcacagtttgttcacctgtaagatgaaagggttggattctttgttttctgtggtcttttccagttctagtgccttgctagtctgatagtgtgaattattttttattacagctggcgctgctgctgcatcagggccatcctttctgcaagacacaatgaccacagcaaagagcgggaaagataactttccacgn

SEQ ID NO: 800 - DNA, 412 bp, Homo sapiens
tttttttttttcaaggttaataaacagctttatttgccttgtacagcatcaattttcttacattctcagttaattggccattaaagtgctggaaattttcttaatcatgataacatttgttaaaaagaaatcagaactaatatcaggaacatggcggcatgaaggaaacagttcccttacaaaacacagaaaatggaagcccctcatgttgagggggtgggttggacaatttgcaaacagattctaatttcctctcaccgtcagcaccaaactggctgggaccaccacccctgggtgaaagaaacaacactaaagaaccctaaaaacacccacacaccctgactaccaccacctctgggccatctgtgggcgtttgctgtttgaacagatccagtctccaggaaagaggaag

SEQ ID NO: 801 - DNA, 413 bp, Homo sapiens
ttttttttaaatcttttatgtatttattatgtttgttgcatcgagtggcataattgtttgaatacaaaactaaagaaattcagggaatttctccctaacatgcactgtaatagttaaaacacatacagacaactgcagattatgttagaatacaagattgttatttgctatttaccacaattgcaaaatcaacttgtcaaggaaagacaattagagtccttcaaatatcttgatgtttatgtgtttgatggctgtaatatacatgtaaattgtggagtatgacatacaaaaaattattgctttaaatatcattattgctagccccaaaaagagttgcaaaacatagctaagtgtatgtttttttcacatagcaggcatttgcctcccattccttttcctcaataaacaatagg

SEQ ID NO: 802 - DNA, 393 bp, Homo sapiens
aaatcaaacctttgatcatgtctttatttagatatagcccatcttgttgcaaaacagatatctcagcaacttacaaaaataaagtacaatagcataaaaaaaaaaagattagggtaaaggtaaaagcagaaagctagaatgaagcgagtctagtaggagactcagcacaattggaaaaaaaagggtctcgaatttgactttgagcttcccagcggccaaaacaaggaagaaaacatgactggttacaagattcctaccaacagttagtctgggactctggtacaaaaacagacctggtttataccttgactctactgcctgttggagacgtgaccctgagcaggttgcttaagctctctgaatttgaggctcatcacctgtaatggggaggaa

SEQ ID NO: 803 - DNA, 409 bp, Homo sapiens
  misc_feature (1)...(409): n=a,t,g or c
atcatagaatagatttatttacctgaaaccatnncngtgcgacgctcattgttaccagcacagaaagaaacaaactgatctctatttacagtctaaagtcaaacatgcgcagtgataaattgacatttagcattttattaagatnnatngcatcncantatttgnattgcaccaacatctgtctactgcttctgatttcnttaaataagttnnatttaatacagtgcganatagctgtctgcacactcagaaaatnactgaaaatgaactggaggcctacattttaaccattcaacacctgtagtgtttttaatgnatttataaatnagcaaactngtacaggggccaattaaaaagtagcatgttccaatgtcactggagaggggatccgggctacttacanccgaag

SEQ ID NO: 804 - DNA, 632 bp, Homo sapiens
  misc_feature (1)...(632): n=a,t,g or c
taaagaaacagaataatttttattgctaggttaatttattacaaagataataatagtctgttgaacttagttacagttaaacacactgtaccgattcaaaatcattatactagtttgatagcttnnngggangnnngagtgggctggggttccaggaattggaagtatcagggtggaaataggaactttataccaagccccatgaccagctgtgcttcaagtgagttttaaaattaattggtcccttccctgaagagggtctggctcagaagaaacaggaactggtagagctgcaccctgtccacagtgatccactactaaaaatactcatacctaggaggaccttaaacttctgaatgctggttcagtaaggctccactgtaaaatcaaacatcttttgtggtattcatttttttattgcttgatgtctggaacagttaccgaaactagacctgtatcgcgcatctctactagtgcttgggcctcaaagcagtgctcgtcacctaactgcacaaagaaatgctattaggtccaattgtgagataagctgaattataaatncccattttcagaacgacaggcacttaaagcncattaagtaaatccaaaatagatatnttaataagaatatt

SEQ ID NO: 805 - DNA, 472 bp, Homo sapiens
ttatttttagaaaaacagagcaaagtttattgaaatttcaagctacatttggaaaatcaaaatccaaatcctggaaccatacatcaggataaggtgtcaaaaagtggaaagtgttcactctcacaaaacccgctacagacaagctttctgggcacacctcccaggctccattggatcaaagccatccccttgttcatccctcatccacagtaggacaccatccttctgttcacttgaaagttttccacaataattacaaaacaaaacaaaaaacgttttcaaatgacactgtgaagcccaaactgatcttctctcaaccccattctatgtagtcagcaccagtgaatggtgggtttgggcattcaaaacaggacttcacgtttcagtgggacagctgggggaaagggttgcagcagcaaggcatccgtggccgcattcagaggctgggcccccctccttggcccctcgtgcc

SEQ ID NO: 806 - DNA, 425 bp, Homo sapiens; identical to SEQ ID NO: 291

SEQ ID NO: 807 - DNA, 432 bp, Homo sapiens
tgcagttaagggacgtgttttatttcatagctttctgcaagcaaaattgctctgatacaaaatgagttcaatgatacaggtgctactgtccactcaagcaaaagaaaacctcacatgtatatgaacgcactttatacttatattcttacagtataataggtctaatatccaggatgcctctggctcattgaaagcaatggcagagaaatgctgcaaggtacttgaatatcatagtactggcaagtgcttgaagtaacttcctgtgagttctctgtcagatactgcaaagactgcgtgtgggtgtgtttgtctttttgtcttccatcttttggtttacatttaaatcatctcaaaaaatatcccctggcatgtatcattcagcttctcagagtttccataaaaacaggaaaatgtcatgaggtatccctaacg

SEQ ID NO: 808 - DNA, 468 bp, Homo sapiens
ttttttttttttttttttttttttttttttttcagaagtaaaagatttttattgttctatagacacttctgaaaagagatctaattgagaaaatatacaaagcatttaagagtttcatccccagagactgactgaaggcgttacagccctcctctccaaggctcagggctgagaacggttagcatatcgaatgatcagtaaaaacatgcaaaagtgagaaggaaagggaaaaaggtgcattcccctaagctgagggggatggaatttcagaacagaggaggcagggtggacaagtaccaggtggctctccctttccctctgtgttatctttcaaaacagttccaagcttggagaaagcaatgagctccacctactcagcagaacccacggctcgtcccccgtggacgtgactgagcagtgaccttgcctgccccgttcctcagccgctccccctcgtgccgaattctt

SEQ ID NO: 809 - DNA, 4087 bp, Homo sapiens
gaattcatgccgttgggtggagtcagcgcccccaggctctacttggaaaacctttaagctcttttctttcgtaagctctctgggcgagggtggtggtatgttttgtgaggtttagcttagccccaaatcctcaagccccgccgccgccgctagtgcggtgcaggaaccgggccagtactgcgcccagggacagagcgctggggaggaacaaaggcggcgctaggctgtgttatccgagagatctttcgggggccgcgggcagcccgtcctgccgcgaccgagggtctgggcgtcccggctgggccccgtgtctgtgcgcacggtttcgctgatgctgaggggccactttctgtctcgcgttgttctctggggaccgggagaggaggaggcacccaaaaagagcgggggcgttgggcgagctcgggggacgtgggagggggaacgggaacaaagcgcagcctagggttagcgtgggaagaccctccgcggtctttggcgttttggaaagatacccacacattcccgggaaaacatggtgagtttctgcccggagcccccggagcgggtgtcagggcggcgaggggcggggttgtttgtttctggcttctatggcgttggagccactgggcgcggttcgcctcactgaacctcttctgtcaggagctgactgaaaaaaaaacaaaaaaacctttcatcattgcggaactgtaggctccaaaagggttttcttcactattataagttagatgacttttttttttcttgagcaaaatcataattcacttcacaagctctttaatgtctggtctggggacgccctgccctgaccgactgaagtgtgtgtgtgtgtgtgtgtgtgtgtgtgtgtgtgtctgtgggacgcctgccctgaccgactgaagtgtgtgtgtgtgtgtgtgtgtgtctgtctgtctcgtctggactgcacagttcagcgagggagaaaggcccactttgtgagggtaccgatggtcaggacccagggaaacgcccttccccgccgcccccccgccccgcccccaccacattcagcgaatagacaattgaaagtggtagccctaaagaccacagagaagaaaacctctattggatgcaaagaatatgaatattatgtgatgggtagagaatctcaggatgaaaatactattttgttgttttaaataaatatttcattatccttccactgggcttttattctttggtaccttttcatgtgatgcttgtttctaacttaggaacttttgtgtgtgtgtgtgtaagatacggataatttttcagcttttacagtggagaagatctggaaaaaggtttttttttaaaaaaaaaagtaatgaaattgctacagacaaagaagaattatactccgcttcccgttgtcccccgttccagtgcatcttaattaattcatttcaattcaggcacatggtcccgggcggtcagaggaggaaaactggcaaaacagcacaatgagatcatgtaggcagctgctggaaatagagcttgctctgttaaataatgtagcagacagtacaggctagcaccaggcacacagcaaatacagcaatgcagcaatgcagaaggcagaccttgtctaaactcctagtattgatggattctgcagtacagatgtccggattataatatcaagtcctattcagaggaaactttcatctttatttaaaagggaagaaagcagtaaaattaatcccaattaagtcataattggatttacttcattttacaaatttgtgctttgaatactgaatagcttttaaatatgaaaatcttctattcaagactggtagtaggccaatggctggatacccgtgctgacagggccaaggcgacaatcattattcagaccacacccatatgcagcatttgtagcaggtgattttccttaaatctttgtatcgtgctggggatatgacctcaaataatttagaaaaatatctgtatattattagaaatattttgaaatttcctataatttaaatgctaatacaccttaattttacatttttcacttttcctccccacagcgtgagtgcatctccatccacgttggccaggctggtgtccagattggcaatgcctgctgggagctctactgcctggaacacggcatccagcccgatggccagatgccaagtgacaagaccattgggggaggagatgattccttcaacaccttcttcagtgagacgggggctggcaagcatgtgccccgggcagtgtttgtagacttggaacccacagtcattggtgagttgacctcagtaacccaagtgagatcccagggtgctggacaggaggtctgtcctggggggctccgctggtcactcacccactctcctcccgctcctcgtcccctcctcctcctccccctgctcctcccccatcatgtctccagatgaagttcgcactggcacctaccgccagctcttccaccctgagcaactcatcacaggcaaagaagatgctgccaataactatgcccgagggcactacaccattggcaaggagatcattgacctcgtgttggaccgaattcgcaagctggtatgtttcttttcaagaataaagtaaattaatgagcctaaagaacacttttgaaataatgctttttttttcaaacacagaattgaactgttattttaataaagagtggaatgagtcattctttggggtttttaaaattcagttaaaatgaactatttgatgtcattttgtaaatgttaatgagaattttttaaaagcatttgtcaaataagatctaagtcctggagatgtatgaaagtgaaatatattactatgatgtactacaagataaactaacctttcctctgtcctctcttttgtataggccgaccagtgcacgcgtctccagggcttcttggttttccacagctttggtgggggaactggttctgggttcacctcgctgctcatggaacgtctctcagttgattatggcaagaagtccaagctggagttctctatttacccggcgccccaggtttccacagctgtagttgagccctacaactccatcctcaccacccacaccaccctggagcactctgattgtgccttcatggtagacaatgaggccatctatgacatctgtcgtagaaacctcgatattgagcgtccaacctatactaacctgaataggttaataggtcaaattgtgtcctccatcactgcttccctgagatttgatggagccctgaatgttgacctgacagaattccagaccaacctggtgccctatccccgcatccacttccctctggccacatatgcccctgtcatctctgctgagaaagcctaccatgaacagctttctgtagcagagatcaccaatgcttgctttgagccagccaaccagatggtgaaatgtgaccctggccatggtaaatacatggcttgctgcctgttgtaccgtggtgacgtggttcccaaagatgtcaatgctgccattgccaccatcaagaccaagcgtaccatccagtttgtggattggtgccccactggcttcaaggttggcatcaactaccagcctcccactgtggtgcctggtggagacctggccaaggtacagagagctgtgtgcatgctgagcaacaccacagccattgctgaggcctgggctcgcctggaccacaagtttgacctgatgtatgccaaacgtgcctttgttcactggtacgttggggaggggatggaggaaggtgagttttcagaggcccgtgaggacatggctgcccttgagaaggattatgaggaggttggtgtgcattctgttgaaggagagggtgaggaagaaggagaggaatactaaagttaaaacgtcacaaaggtgctgcttttacagggaagcttattctgttttaaacattgaaaatgttgtggtctgatcagttaatttgtatgtagcagtgtatgctctcatatcaattactgacctatgctctaaaacatgaatgcctttgttacagacccaagctgtccatttctgtgatgggttttgaataaagtattccctgtcttaaatgaattc

SEQ ID NO: 810 - DNA, 2602 bp, Homo sapiens
gccgtgtcgccaccatggctccgcaccgccccgcgcccgcgctgctttgcgcgctgtccctggcgctgtgcgcgctgtcgctgcccgtccgcgcggccactgcgtcgcggggggcgtccccggcgggggcgccccaggggcgggtgcccgaggcgcggcccaacagcatggtggtggaacaccccgagttcctcaaggcagggaaggagcctggcctgcagatctggcgtgtggagaagttcgatctggtgcccgtgcccaccaacctttatggagacttcttcacgggcgacgcctacgtcatcctgaagacagtgcagctgaggaacggaaatctgcagtatgacctccactactggctgggcaatgagtgcagccaggatgagagcggggcggccgccatctttaccgtgcagctggatgactacctgaacggccgggccgtgcagcaccgtgaggtccagggcttcgagtcggccaccttcctaggctacttcaagtctggcctgaagtacaagaaaggaggtgtggcatcaggattcaagcacgtggtacccaacgaggtggtggtgcagagactcttccaggtcaaagggcggcgtgtggtccgtgccaccgaggtacctgtgtcctgggagagcttcaacaatggcgactgcttcatcctggacctgggcaacaacatccaccagtggtgtggttccaacagcaatcggtatgaaagactgaaggccacacaggtgtccaagggcatccgggacaacgagcggagtggccgggcccgagtgcacgtgtctgaggagggcactgagcccgaggcgatgctccaggtgctgggccccaagccggctctgcctgcaggtaccgaggacaccgccaaggaggatgcggccaaccgcaagctggccaagctctacaaggtctccaatggtgcagggaccatgtccgtctccctcgtggctgatgagaaccccttcgcccagggggccctgaagtcagaggactgcttcatcctggaccacggcaaagatgggaaaatctttgtctggaaaggcaagcaggcaaacacggaggagaggaaggctgccctcaaaacagcctctgacttcatcaccaagatggactaccccaagcagactcaggtctcggtccttcctgagggcggtgagaccccactgttcaagcagttcttcaagaactggcgggacccagaccagacagatggcctgggcttgtcctacctttccagccatatcgccaacgtggagcgggtgcccttcgacgccgccaccctgcacacctccactgccatggccgcccagcacggcatggatgacgatggcacaggccagaaacagatctggagaatcgaaggttccaacaaggtgcccgtggaccctgccacatatggacagttctatggaggcgacagctacatcattctgtacaactaccgccatggtggccgccaggggcagataatctataactggcagggtgcccagtctacccaggatgaggtcgctgcatctgccatcctgactgctcagctggatgaggagctgggaggtacccctgtccagagccgtgtggtccaaggcaaggagcccgcccacctcatgagcctgtttggtgggaagcccatgatcatctacaagggcggcacctcccgcgagggcgggcagacagcccctgccagcacccgcctcttccaggtccgcgccaacagcgctggagccacccgggctgttgaggtattgcctaaggctggtgcactgaactccaacgatgcctttgttctgaaaaccccctcagccgcctacctgtgggtgggtacaggagccagcgaggcagagaagacgggggcccaggagctgctcagggtgctgcgggcccaacctgtgcaggtggcagaaggcagcgagccagatggcttctgggaggccctgggcgggaaggctgcctaccgcacatccccacggctgaaggacaagaagatggatgcccatcctcctcgcctctttgcctgctccaacaagattggacgttttgtgatcgaagaggttcctggtgagctcatgcaggaagacctggcaacggatgacgtcatgcttctggacacctgggaccaggtctttgtctgggttggaaaggattctcaagaagaagaaaagacagaagccttgacttctgctaagcggtacatcgagacggacccagccaatcgggatcggcggacgcccatcaccgtggtgaagcaaggctttgagcctccctcctttgtgggctggttccttggctgggatgatgattactggtctgtggaccccttggacagggccatggctgagctggctgcctgaggaggggcagggcccacccatgtcaccggtcagtgccttttggaactgtccttccctcaaagaggccttagagcgagcagagcagctctgctatgagtgtgtgtgtgtgtgtgtgttgtttcttttttttttttttacagtatccaaaaatagccctgcaaaaattcagagtccttgcaaaattgtctaaaatgtcagtgtttgggaaattaaatccaataaaaacattttgaagtgtg

SEQ ID NO: 811 - DNA, 1330 bp, Homo sapiens
gcagcccagccaagcactgtcaggaatcctgtgaagcagctccagctatgtgtgaagaagaggacagcactgccttggtgtgtgacaatggctctgggctctgtaaggccggctttgctggggacgatgctcccagggctgttttcccatccattgtgggacgtcccagacatcagggggtgatggtgggaatgggacaaaaagacagctacgtgggtgacgaagcacagagcaaaagaggaatcctgaccctgaagtacccgatagaacatggcatcatcaccaactgggacgacatggaaaagatctggcaccactctttctacaatgagcttcgtgttgcccctgaagagcatcccaccctgctcacggaggcacccctgaaccccaaggccaaccgggagaaaatgactcaaattatgtttgagactttcaatgtcccagccatgtatgtggctatccaggcggtgctgtctctctatgcctctggacgcacaactggcatcgtgctggactctggagatggtgtcacccacaatgtccccatctatgagggctatgccttgccccatgccatcatgcgtctggatctggctggccgagatctcactgactacctcatgaagatcctgactgagcgtggctattccttcgttactactgctgagcgtgagattgtccgggacatcaaggagaaactgtgttatgtagctctggactttgaaaatgagatggccactgccgcatcctcatcctcccttgagaagagttacgagttgcctgatgggcaagtgatcaccatcggaaatgaacgtttccgctgcccagagaccctgttccagccatccttcatcgggatggagtctgctggcatccatgaaaccacctacaacagcatcatgaagtgtgatattgacatcaggaaggacctctatgctaacaatgtcctatcagggggcaccactatgtaccctggcattgccgaccgaatgcagaaggagatcacggccctagcacccagcaccatgaagatcaagatcattgcccctccggagcgcaaatactctgtctggatcggtggctccatcctggcctctctgtccaccttccagcagatgtggatcagcaaacaggaatacgatgaagccgggccttccattgtccaccgcaaatgcttctaaaacactttcctgctcctctctgtctctagcacacaactgtgaatgtcctgtggaattatgccttcagttcttttccaaatcattcctagccaaagctctgactcgttacctatgtgttttttaataaatctgaaataggctactggtaa

SEQ ID NO: 812 - DNA, 3464 bp, Homo sapiens
cagccgtgctcgaagcgttcctggagcccaagctctcctccacaggtgaagacagggccagcaggagacaccatggggcacctctcagccccacttcacagagtgcgtgtaccctggcaggggcttctgctcacagcctcacttctaaccttctggaacccgcccaccactgcccagctcactactgaatccatgccattcaatgttgcagaggggaaggaggttcttctccttgtccacaatctgccccagcaactttttggctacagctggtacaaaggggaaagagtggatggcaaccgtcaaattgtaggatatgcaataggaactcaacaagctaccccagggcccgcaaacagcggtcgagagacaatataccccaatgcatccctgctgatccagaacgtcacccagaatgacacaggattctacaccctacaagtcataaagtcagatcttgtgaatgaagaagcaactggacagttccatgtatacccggagctgcccaagccctccatctccagcaacaactccaaccctgtggaggacaaggatgctgtggccttcacctgtgaacctgagactcaggacacaacctacctgtggtggataaacaatcagagcctcccggtcagtcccaggctgcagctgtccaatggcaacaggaccctcactctactcagtgtcacaaggaatgacacaggaccctatgagtgtgaaatacagaacccagtgagtgcgaaccgcagtgacccagtcaccttgaatgtcacctatggcccggacacccccaccatttccccttcagacacctattaccgtccaggggcaaacctcagcctctcctgctatgcagcctctaacccacctgcacagtactcctggcttatcaatggaacattccagcaaagcacacaagagctctttatccctaacatcactgtgaataatagtggatcctatacctgccacgccaataactcagtcactggctgcaacaggaccacagtcaagacgatcatagtcactgagctaagtccagtagtagcaaagccccaaatcaaagccagcaagaccacagtcacaggagataaggactctgtgaacctgacctgctccacaaatgacactggaatctccatccgttggttcttcaaaaaccagagtctcccgtcctcggagaggatgaagctgtcccagggcaacaccaccctcagcataaaccctgtcaagagggaggatgctgggacgtattggtgtgaggtcttcaacccaatcagtaagaaccaaagcgaccccatcatgctgaacgtaaactataatgctctaccacaagaaaatggcctctcacctggggccattgctggcattgtgattggagtagtggccctggttgctctgatagcagtagccctggcatgttttctgcatttcgggaagaccggcagggcaagcgaccagcgtgatctcacagagcacaaaccctcagtctccaaccacactcaggaccactccaatgacccacctaacaagatgaatgaagttacttattctaccctgaactttgaagcccagcaacccacacaaccaacttcagcctccccatccctaacagccacagaaataatttattcagaagtaaaaaagcagtaatgaaacctgtcctgctcactgcagtgctgatgtatttcaagtctctcaccctcatcactaggagattcctttcccctctagggtagaggggtggggacagaaacaactttctcctactcttccttcctaataggcatctccaggctgcctggtcactgcccctctctcagtgtcaatagatgaaagtacattgggagtctgtaggaaacccaaccttcttgtcattgaaatttggcaaagctgactttgggaaagagggaccagaacttcccctcccttccccttttcccaacctggacttgttttaaacttgcctgttcagagcactcattccttcccacccccagtcctgtcctatcactctaattcggatttgccatagccttgaggttatgtccttttccattaagtacatgtgccaggaaacagcgagagagagaaagtaaacggcagtaatgcttctcctatttctccaaagccttgtgtgaactagcaaagagaagaaaaccaaatatataaccaatagtgaaatgccacaggtttgtccactgtcagggttgtctacctgtaggatcagggtctaagcaccttggtgcttagctagaataccacctaatccttctggcaagcctgtcttcagagaacccactagaagcaactaggaaaaatcacttgccaaaatccaaggcaattcctgatggaaaatgcaaaagcacatatatgttttaatatctttatgggctctgttcaaggcagtgctgagagggaggggttatagcttcaggagggaaccagcttctgataaacacaatctgctaggaacttgggaaaggaatcagagagctgcccttcagcgattatttaaattattgttaaagaatacacaatttggggtattgggatttttctccttttctctgagacattccaccattttaatttttgtaactgcttatttatgtgaaaagggttatttttacttagcttagctatgtcagccaatccgattgccttaggtgaaagaaaccaccgaaatccctcaggtcccttggtcaggagcctctcaagattttttttgtcagaggctccaaatagaaaataagaaaaggttttcttcattcatggctagagctagatttaactcagtttctaggcacctcagaccaatcatcaactaccattctattccatgtttgcacctgtgcattttctgtttgcccccattcactttgtcaggaaaccttggcctctgctaaggtgtatttggtccttgagaagtgggagcaccctacagggacactatcactcatgctggtggcattgtttacagctagaaagctgcactggtgctaatgccccttgggaaatggggctgtgaggaggaggattataacttaggcctagcctcttttaacagcctctgaaatttatcttttcttctatggggcttataaatgtatcttataataaaaaggaaggacaggaggaagacaggcaaatgtacttctcacccagtcttctacacagatggaatctctttggggctaagagaaaggttttattctatattgcttacctgatctcatgttaggcctaagaggctttctccaggaggattagcttggagttctctatactcaggtacctctttcagggttttctaaccctgacacggactgtgcatactttccctcatccatgctgtgctgtgttatttaatttttcctggctaagatcatgtctgaattatgtatgaaaattattctatgtttttataataaaaataatatatcagacatcgaaaaaaaaaa

SEQ ID NO: 813 - DNA, 3132 bp, Homo sapiens
ccgcagaacttggggagccgccgccgccatccgccgccgcagccagcttccgccgccgcaggaccggcccctgccccagcctccgcagccgcggcgcgtccacgcccgcccgcgcccagggcgagtcggggtcgccgcctgcacgcttctcagtgttccccgcgccccgcatgtaacccggccaggcccccgcaacggtgtcccctgcagctccagccccgggctgcacccccccgccccgacaccagctctccagcctgctcgtccaggatggccgcggccaaggccgagatgcagctgatgtccccgctgcagatctctgacccgttcggatcctttcctcactcgcccaccatggacaactaccctaagctggaggagatgatgctgctgagcaacggggctccccagttcctcggcgccgccggggccccagagggcagcggcagcaacagcagcagcagcagcagcgggggcggtggaggcggcgggggcggcagcaacagcagcagcagcagcagcaccttcaaccctcaggcggacacgggcgagcagccctacgagcacctgaccgcagagtcttttcctgacatctctctgaacaacgagaaggtgctggtggagaccagttaccccagccaaaccactcgactgccccccatcacctatactggccgcttttccctggagcctgcacccaacagtggcaacaccttgtggcccgagcccctcttcagcttggtcagtggcctagtgagcatgaccaacccaccggcctcctcgtcctcagcaccatctccagcggcctcctccgcctccgcctcccagagcccacccctgagctgcgcagtgccatccaacgacagcagtcccatttactcagcggcacccaccttccccacgccgaacactgacattttccctgagccacaaagccaggccttcccgggctcggcagggacagcgctccagtacccgcctcctgcctaccctgccgccaagggtggcttccaggttcccatgatccccgactacctgtttccacagcagcagggggatctgggcctgggcaccccagaccagaagcccttccagggcctggagagccgcacccagcagccttcgctaacccctctgtctactattaaggcctttgccactcagtcgggctcccaggacctgaaggccctcaataccagctaccagtcccagctcatcaaacccagccgcatgcgcaagtatcccaaccggcccagcaagacgcccccccacgaacgcccttacgcttgcccagtggagtcctgtgatcgccgcttctcccgctccgacgagctcacccgccacatccgcatccacacaggccagaagcccttccagtgccgcatctgcatgcgcaacttcagccgcagcgaccacctcaccacccacatccgcacccacacaggcgaaaagcccttcgcctgcgacatctgtggaagaaagtttgccaggagcgatgaacgcaagaggcataccaagatccacttgcggcagaaggacaagaaagcagacaaaagtgttgtggcctcttcggccacctcctctctctcttcctacccgtccccggttgctacctcttacccgtccccggttactacctcttatccatccccggccaccacctcatacccatcccctgtgcccacctccttctcctctcccggctcctcgacctacccatcccctgtgcacagtggcttcccctccccgtcggtggccaccacgtactcctctgttccccctgctttcccggcccaggtcagcagcttcccttcctcagctgtcaccaactccttcagcgcctccacagggctttcggacatgacagcaaccttttctcccaggacaattgaaatttgctaaagggaaaggggaaagaaagggaaaagggagaaaaagaaacacaagagacttaaaggacaggaggaggagatggccataggagaggagggttcctcttaggtcagatggaggttctcagagccaagtcctccctctctactggagtggaaggtctattggccaacaatcctttctgcccacttccccttccccaattactattccctttgacttcagctgcctgaaacagccatgtccaagttcttcacctctatccaaagaacttgatttgcatggattttggataaatcatttcagtatcatctccatcatatgcctgaccccttgctcccttcaatgctagaaaatcgagttggcaaaatggggtttgggcccctcagagccctgccctgcacccttgtacagtgtctgtgccatggatttcgtttttcttggggtactcttgatgtgaagataatttgcatattctattgtattatttggagttaggtcctcacttgggggaaaaaaaaaaaaaaaagccaagcaaaccaatggtgatcctctattttgtgatgatgctgtgacaataagtttgaacctttttttttgaaacagcagtcccagtattctcagagcatgtgtcagagtgttgttccgttaacctttttgtaaatactgcttgaccgtactctcacatgtggcaaaatatggtttggtttttcttttttttttttgaaagtgttttttcttcgtccttttggtttaaaaagtttcacgtcttggtgccttttgtgtgatgccccttgctgatggcttgacatgtgcaattgtgagggacatgctcacctctagccttaaggggggcagggagtgatgatttgggggaggctttgggagcaaaataaggaagagggctgagctgagcttcggttctccagaatgtaagaaaacaaaatctaaaacaaaatctgaactctcaaaagtctatttttttaactgaaaatgtaaatttataaatatattcaggagttggaatgttgtagttacctactgagtaggcggcgatttttgtatgttatgaacatgcagttcattattttgtggttctattttactttgtacttgtgtttgcttaaacaaagtgactgtttggcttataaacacattgaatgcgctttattgcccatgggatatgtggtgtatatccttccaaaaaattaaaacgaaaataaagtagctgcgattggg

SEQ ID NO: 814 - DNA, 603 bp, Homo sapiens
cgtgctgctacacaagaaccctgagactgacctgcaggacgaaaccatgaagagcctgatccttcttgccatcctggccgccttagcggtagtaactttgtgttatgaatcacatgaaagcatggaatcttatgaacttaatcccttcattaacaggagaaatgcaaataccttcatatcccctcagcagagatggagagctaaagtccaagagaggatccgagaacgctctaagcctgtccacgagctcaatagggaagcctgtgatgactacagactttgcgaacgctacgccatggtttatggatacaatgctgcctataatcgctacttcaggaagcgccgaggggccaaatgagactgagggaagaaaaaaaatctctttttttctggaggctggcacctgattttgtatccccctgtagcagcattactgaaatacataggcttatatacaatgcttctttcctgtatattctcttgtctggctgcacccctttttcccgcccccagattgataagtaatgaaagtgcactgcagtgagggtcaaaggagagtcaacatatgtgattgttccataataaacttctggtgtgatactt

SEQ ID NO: 815 - DNA, 8368 bp, Homo sapiens
gcgatccgggcgccaccccgcggtcatcggtcaccggtcgctctcaggaacagcagcgcaacctctgctccctgcctcgcctcccgcgcgcctaggtgcctgcgactttaattaaagggccgtcccctcgccgaggctgcagcaccgcccccccggcttctcgcgcctcaaaatgagtagctcccactctcgggcgggccagagcgcagcaggcgcggctccgggcggcggcgtcgacacgcgggacgccgagatgccggccaccgagaaggacctggcggaggacgcgccgtggaagaagatccagcagaacactttcacgcgctggtgcaacgagcacctgaagtgcgtgagcaagcgcatcgccaacctgcagacggacctgagcgacgggctgcggcttatcgcgctgttggaggtgctcagccagaagaagatgcaccgcaagcacaaccagcggcccactttccgccaaatgcagcttgagaacgtgtcggtggcgctcgagttcctggaccgcgagagcatcaaactggtgtccatcgacagcaaggccatcgtggacgggaacctgaagctgatcctgggcctcatctggaccctgatcctgcactactccatctccatgcccatgtgggacgaggaggaggatgaggaggccaagaagcagacccccaagcagaggctcctgggctggatccagaacaagctgccgcagctgcccatcaccaacttcagccgggactggcagagcggccgggccctgggcgccctggtggacagctgtgccccgggcctgtgtcctgactgggactcttgggacgccagcaagcccgttaccaatgcgcgagaggccatgcagcaggcggatgactggctgggcatcccccaggtgatcacccccgaggagattgtggaccccaacgtggacgagcactctgtcatgacctacctgtcccagttccccaaggccaagctgaagccaggggctcccttgcgccccaaactgaacccgaagaaagcccgtgcctacgggccaggcatcgagcccacaggcaacatggtgaagaagcgggcagagttcactgtggagaccagaagtgctggccagggagaggtgctggtgtacgtggaggacccggccggacaccaggaggaggcaaaagtgaccgccaataacgacaagaaccgcaccttctccgtctggtacgtccccgaggtgacggggactcataaggttactgtgctctttgctggccagcacatcgccaagagccccttcgaggtgtacgtggataagtcacagggtgacgccagcaaagtgacagcccaaggtcccggcctggagcccagtggcaacatcgccaacaagaccacctactttgagatctttacggcaggagctggcacgggcgaggtcgaggttgtgatccaggaccccatgggacagaagggcacggtagagcctcagctggaggcccggggcgacagcacataccgctgcagctaccagcccaccatggagggcgtccacaccgtgcacgtcacgtttgccggcgtgcccatccctcgcagcccctacactgtcactgttggccaagcctgtaacccgagtgcctgccgggcggttggccggggcctccagcccaagggtgtgcgggtgaaggagacagctgacttcaaggtgtacacaaagggcgctggcagtggggagctgaaggtcaccgtgaagggccccaagggagaggagcgcgtgaagcagaaggacctgggggatggcgtgtatggcttcgagtattaccccatggtccctggaacctatatcgtcaccatcacgtggggtggtcagaacatcgggcgcagtcccttcgaagtgaaggtgggcaccgagtgtggcaatcagaaggtacgggcctggggccctgggctggagggcggcgtcgttggcaagtcagcagactttgtggtggaggctatcggggacgacgtgggcacgctgggcttctcggtggaagggccatcgcaggctaagatcgaatgtgacgacaagggcgacggctcctgtgatgtgcgctactggccgcaggaggctggcgagtatgccgttcacgtgctgtgcaacagcgaagacatccgcctcagccccttcatggctgacatccgtgacgcgccccaggacttccacccagacagggtgaaggcacgtgggcctggattggagaagacaggtgtggccgtcaacaagccagcagagttcacagtggatgccaagcacggtggcaaggccccacttcgggtccaagtccaggacaatgaaggctgccctgtggaggcgttggtcaaggacaacggcaatggcacttacagctgctcctacgtgcccaggaagccggtgaagcacacagccatggtgtcctggggaggcgtcagcatccccaacagccccttcagggtgaatgtgggagctggcagccaccccaacaaggtcaaagtatacggccccggagtagccaagacagggctcaaggcccacgagcccacctacttcactgtggactgcgccgaggctggccagggggacgtcagcatcggcatcaagtgtgcccctggagtggtaggccccgccgaagctgacatcgacttcgacatcatccgcaatgacaatgacaccttcacggtcaagtacacgccccggggggctggcagctacaccattatggtcctctttgctgaccaggccacgcccaccagccccatccgagtcaaggtggagccctctcatgacgccagtaaggtgaaggccgagggccctggcctcagtcgcactggtgtcgagcttggcaagcccacccacttcacagtaaatgccaaagctgctggcaaaggcaagctggacgtccagttctcaggactcaccaagggggatgcagtgcgagatgtggacatcatcgaccaccatgacaacacctacacagtcaagtacacgcctgtccagcagggtccagtaggcgtcaatgtcacttatggaggggatcccatccctaagagccctttctcagtggcagtatctccaagcctggacctcagcaagatcaaggtgtctggcctgggagagaaggtggacgttggcaaagaccaggagttcacagtcaaatcaaagggtgctggtggtcaaggcaaagtggcatccaagattgtgggcccctcgggtgcagcggtgccctgcaaggtggagccaggcctgggggctgacaacagtgtggtgcgcttcctgccccgtgaggaagggccctatgaggtggaggtgacctatgacggcgtgcccgtgcctggcagcccctttcctctggaagctgtggcccccaccaagcctagcaaggtgaaggcgtttgggccggggctgcagggaggcagtgcgggctcccccgcccgcttcaccatcgacaccaagggcgccggcacaggtggcctgggcctgacggtggagggcccctgtgaggcgcagctcgagtgcttggacaatggggatggcacatgttccgtgtcctacgtgcccaccgagcccggggactacaacatcaacatcctcttcgctgacacccacatccctggctccccattcaaggcccacgtggttccctgctttgacgcatccaaagtcaagtgctcaggccccgggctggagcgggccaccgctggggaggtgggccaattccaagtggactgctcgagcgcgggcagcgcggagctgaccattgagatctgctcggaggcggggcttccggccgaggtgtacatccaggaccacggtgatggcacgcacaccattacctacattcccctctgccccggggcctacaccgtcaccatcaagtacggcggccagcccgtgcccaacttccccagcaagctgcaggtggaacctgcggtggacacttccggtgtccagtgctatgggcctggtattgagggccagggtgtcttccgtgaggccaccactgagttcagtgtggacgcccgggctctgacacagaccggagggccgcacgtcaaggcccgtgtggccaacccctcaggcaacctgacggagacctacgttcaggaccgtggcgatggcatgtacaaagtggagtacacgccttacgaggagggactgcactccgtggacgtgacctatgacggcagtcccgtgcccagcagccccttccaggtgcccgtgaccgagggctgcgacccctcccgggtgcgtgtccacgggccaggcatccaaagtggcaccaccaacaagcccaacaagttcactgtggagaccaggggagctggcacgggcggcctgggcctggctgtagagggcccctccgaggccaagatgtcctgcatggataacaaggacggcagctgctcggtcgagtacatcccttatgaggctggcacctacagcctcaacgtcacctatggtggccatcaagtgccaggcagtcctttcaaggtccctgtgcatgatgtgacagatgcgtccaaggtcaagtgctctgggcccggcctgagcccaggcatggttcgtgccaacctccctcagtccttccaggtggacacaagcaaggctggtgtggccccattgcaggtcaaagtgcaagggcccaaaggcctggtggagccagtggacgtggtagacaacgctgatggcacccagaccgtcaattatgtgcccagccgagaagggccctacagcatctcagtactgtatggagatgaagaggtaccccggagccccttcaaggtcaaggtgctgcctactcatgatgccagcaaggtgaaggccagtggccccgggctcaacaccactggcgtgcctgccagcctgcccgtggagttcaccatcgatgcaaaggacgccggggagggcctgctggctgtccagatcacggatcccgaaggcaagccgaagaagacacacatccaagacaaccatgacggcacgtatacagtggcctacgtgccagacgtgacaggtcgctacaccatcctcatcaagtacggtggtgacgagatccccttctccccgtaccgcgtgcgtgccgtgcccaccggggacgccagcaagtgcactgtcacagtgtcaatcggaggtcacgggctaggtgctggcatcggccccaccattcagattggggaggagacggtgatcactgtggacactaaggcggcaggcaaaggcaaagtgacgtgcaccgtgtgcacgcctgatggctcagaggtggatgtggacgtggtggagaatgaggacggcactttcgacatcttctacacggccccccagccgggcaaatacgtcatctgtgtgcgctttggtggcgagcacgtgcccaacagccccttccaagtgacggctctggctggggaccagccctcggtgcagccccctctacggtctcagcagctggccccacagtacacctacgcccagggcggccagcagacttgggccccggagaggcccctggtgggtgtcaatgggctggatgtgaccagcctgaggccctttgaccttgtcatccccttcaccatcaagaagggcgagatcacaggggaggttcggatgccctcaggcaaggtggcgcagcccaccatcactgacaacaaagacggcaccgtgaccgtgcggtatgcacccagcgaggctggcctgcacgagatggacatccgctatgacaacatgcacatcccaggaagccccttgcagttctatgtggattacgtcaactgtggccatgtcactgcctatgggcctggcctcacccatggagtagtgaacaagcctgccaccttcaccgtcaacaccaaggatgcaggagaggggggcctgtctctggccattgagggcccgtccaaagcagaaatcagctgcactgacaaccaggatgggacatgcagcgtgtcctacctgcctgtgctgccgggggactacagcattctagtcaagtacaatgaacagcacgtcccaggcagccccttcactgctcgggtcacaggtgacgactccatgcgtatgtcccacctaaaggtcggctctgctgccgacatccccatcaacatctcagagacggatctcagcctgctgacggccactgtggtcccgccctcgggccgggaggagccctgtttgctgaagcggctgcgtaatggccacgtggggatttcattcgtgcccaaggagacgggggagcacctggtgcatgtgaagaaaaatggccagcacgtggccagcagccccatcccggtggtgatcagccagtcggaaattggggatgccagtcgtgttcgggtctctggtcagggccttcacgaaggccacacctttgagcctgcagagtttatcattgatacccgcgatgcaggctatggtgggctcagcctgtccattgagggccccagcaaggtggacatcaacacagaggacctggaggacgggacgtgcagggtcacctactgccccacagagccaggcaactacatcatcaacatcaagtttgccgaccagcacgtgcctggcagccccttctctgtgaaggtgacaggcgagggccgggtgaaagagagcatcacccgcaggcgtcgggctccttcagtggccaacgttggtagtcattgtgacctcagcctgaaaatccctgaaattagcatccaggatatgacagcccaggtgaccagcccatcgggcaagacccatgaggccgagatcgtggaaggggagaaccacacctactgcatccgctttgttcccgctgagatgggcacacacacagtcagcgtcaagtacaagggccagcacgtgcctgggagccccttccagttcaccgtggggcccctaggggaagggggagcccacaaggtccgagctgggggccctggcctggagagagctgaagctggagtgccagccgaattcagtatctggacccgggaagctggtgctggaggcctggccattgctgtcgagggccccagcaaggctgagatctcttttgaggaccgcaaggacggctcctgtggtgtggcttatgtggtccaggagccaggtgactacgaagtctcagtcaagttcaacgaggaacacattcccgacagccccttcgtggtgcctgtggcttctccgtctggcgacgcccgccgcctcactgtttctagccttcaggagtcagggctaaaggtcaaccagccagcctcttttgcagtcagcctgaacggggccaagggggcgatcgatgccaaggtgcacagcccctcaggagccctggaggagtgctatgtcacagaaattgaccaagataagtatgctgtgcgcttcatccctcgggagaatggcgtttacctgattgacgtcaagttcaacggtacccacatccctggaagccccttcaagatccgagttggggagcctgggcatggaggggacccaggcttggtgtctgcttacggagcaggtctggaaggcggtgtcacagggaacccagctgagttcgtcgtgaacacgagcaatgcgggagctggtgccctgtcggtgaccattgacggcccctccaaggtgaagatggattgccaggagtgccctgagggctaccgcgtcacctatacccccatggcacctggcagctacctcatctccatcaagtacggcggcccctaccacattgggggcagccccttcaaggccaaagtcacaggcccccgtctcgtcagcaaccacagcctccacgagacatcatcagtgtttgtagactctctgaccaaggccacctgtgccccccagcatggggccccgggtcctgggcctgctgacgccagcaaggtggtggccaagggcctggggctgagcaaggcctacgtaggccagaagagcagcttcacagtagactgcagcaaagcaggcaacaacatgctgctggtgggggttcatggcccaaggaccccctgcgaggagatcctggtgaagcacgtgggcagccggctctacagcgtgtcctacctgctcaaggacaagggggagtacacactggtggtcaaatgggggcacgagcacatcccaggcagcccctaccgcgttgtggtgccctgagtctggggcccgtgccagccggcagcccccaagcctgccccgctacccaagcagccccgccctcttcccctcaaccccggcccaggccgccctggccgcccgcctgtcactgcagctgcccctgccctgtgccgtgctgcgctcacctgcctccccagccagccgctgacctctcggctttcacttgggcagagggagccatttggtggcgctgcttgtcttctttggttctgggaggggtgagggatgggg

SEQ ID NO: 816 - DNA, 2919 bp, Homo sapiens; identical to SEQ ID NO: 309

SEQ ID NO: 817 - DNA, 18061 bp, Homo sapiens; identical to SEQ ID NO: 310

SEQ ID NO: 818 - DNA, 18061 bp, Homo sapiens; identical to SEQ ID NO: 310

SEQ ID NO: 819 - DNA, 415 bp, Homo sapiens
ccgctgcgtgttttcctcttgatcgggaactcctgcttctccttgcctcgaaatggaccccaactgctcctgctcgcctgttggctcctgtgcctgtgccggctcctgcaaatgcaaagagtgcaaatgcacctcctgcaagaagagctgctgctcctgctgccctgtgggctgtgcmaagtgtgcccagggctgcatctgcaaagggacgtcagacaagtgcagctgctgtgcctgatgccaggacagctgtgctctcagatgtaaatagagcaacctatataaacctggatttttttttttttttttttgtacaaccctgacccgtttgctacatctttttttctatgaaatatgtgaatggcaataaattcatctagactaaaaaaaaaaaaaaaaaaaaaaaaaaaaaaaa

SEQ ID NO: 820 - DNA, 7560 bp, Homo sapiens
accggccacagcctgcctactgtcacccgcctctcccgcgcgcagatacacgcccccgcctccgtgggcacaaaggcagcgctgctggggaactcgggggaacgcgcacgtgggaaccgccgcagctccacactccaggtacttcttccaaggacctaggtctctcgcccatcggaaagaaaataattctttcaagaagatcagggacaactgatttgaagtctactctgtgcttctaaatccccaattctgctgaaagtgaatccctagagccctagagccccagcagcacccagccaaacccacctccaccatgggggccatgactcagctgttggcaggtgtctttcttgctttccttgccctcgctaccgaaggtggggtcctcaagaaagtcatccggcacaagcgacagagtggggtgaacgccaccctgccagaagagaaccagccagtggtgtttaaccacgtttacaacatcaagctgccagtgggatcccagtgttcggtggatctggagtcagccagtggggagaaagacctggcaccgccttcagagcccagcgaaagctttcaggagcacacagtagatggggaaaaccagattgtcttcacacatcgcatcaacatcccccgccgggcctgtggctgtgccgcagcccctgatgttaaggagctgctgagcagactggaggagctggagaacctggtgtcttccctgagggagcaatgtactgcaggagcaggctgctgtctccagcctgccacaggccgcttggacaccaggcccttctgtagcggtcggggcaacttcagcactgaaggatgtggctgtgtctgcgaacctggctggaaaggccccaactgctctgagcccgaatgtccaggcaactgtcaccttcgaggccggtgcattgatgggcagtgcatctgtgacgacggcttcacgggcgaggactgcagccagctggcttgccccagcgactgcaatgaccagggcaagtgcgtgaatggagtctgcatctgtttcgaaggctacgccggggctgactgcagccgtgaaatctgcccagtgccctgcagtgaggagcacggcacatgtgtagatggcttgtgtgtgtgccacgatggctttgcaggcgatgactgcaacaagcctctgtgtctcaacaattgctacaaccgtggacgatgcgtggagaatgagtgcgtgtgtgatgagggtttcacgggcgaagactgcagtgagctcatctgccccaatgactgcttcgaccggggccgctgcatcaatggcacctgctactgcgaagaaggcttcacaggtgaagactgcgggaaacccacctgcccacatgcctgccacacccagggccggtgtgaggaggggcagtgtgtatgtgatgagggctttgccggtttggactgcagcgagaagaggtgtcctgctgactgtcacaatcgtggccgctgtgtagacgggcggtgtgagtgtgatgatggtttcactggagctgactgtggggagctcaagtgtcccaatggctgcagtggccatggccgctgtgtcaatgggcagtgtgtgtgtgatgagggctatactggggaggactgcagccagctacggtgccccaatgactgtcacagtcggggccgctgtgtcgagggcaaatgtgtatgtgagcaaggcttcaagggctatgactgcagtgacatgagctgccctaatgactgtcaccagcacggccgctgtgtgaatggcatgtgtgtttgtgatgacggctacacaggggaagactgccgggatcgccaatgccccagggactgcagcaacaggggcctctgtgtggacggacagtgcgtctgtgaggacggcttcaccggccctgactgtgcagaactctcctgtccaaatgactgccatggccagggtcgctgtgtgaatgggcagtgcgtgtgccatgaaggatttatgggcaaagactgcaaggagcaaagatgtcccagtgactgtcatggccagggccgctgcgtggacggccagtgcatctgccacgagggcttcacaggcctggactgtggccagcactcctgccccagtgactgcaacaacttaggacaatgcgtctcgggccgctgcatctgcaacgagggctacagcggagaagactgctcagaggtgtctcctcccaaagacctcgttgtgacagaagtgacggaagagacggtcaacctggcctgggacaatgagatgcgggtcacagagtaccttgtcgtgtacacgcccacccacgagggtggtctggaaatgcagttccgtgtgcctggggaccagacgtccaccatcatccaggagctggagcctggtgtggagtactttatccgtgtatttgccatcctggagaacaagaagagcattcctgtcagcgccagggtggccacgtacttacctgcacctgaaggcctgaaattcaagtccatcaaggagacatctgtggaagtggagtgggatcctctagacattgcttttgaaacctgggagatcatcttccggaatatgaataaagaagatgagggagagatcaccaaaagcctgaggaggccagagacctcttaccggcaaactggtctagctcctgggcaagagtatgagatatctctgcacatagtgaaaaacaatacccggggccctggcctgaagagggtgaccaccacacgcttggatgcccccagccagatcgaggtgaaagatgtcacagacaccactgccttgatcacctggttcaagcccctggctgagatcgatggcattgagctgacctacggcatcaaagacgtgccaggagaccgtaccaccatcgatctcacagaggacgagaaccagtactccatcgggaacctgaagcctgacactgagtacgaggtgtccctcatctcccgcagaggtgacatgtcaagcaacccagccaaagagaccttcacaacaggcctcgatgctcccaggaatcttcgacgtgtttcccagacagataacagcatcaccctggaatggaggaatggcaaggcagctattgacagttacagaattaagtatgcccccatctctggaggggaccacgctgaggttgatgttccaaagagccaacaagccacaaccaaaaccacactcacaggtctgaggccgggaactgaatatgggattggagtttctgctgtgaaggaagacaaggagagcaatccagcgaccatcaacgcagccacagagttggacacgcccaaggaccttcaggtttctgaaactgcagagaccagcctgaccctgctctggaagacaccgttggccaaatttgaccgctaccgcctcaattacagtctccccacaggccagtgggtgggagtgcagcttccaagaaacaccacttcctatgtcctgagaggcctggaaccaggacaggagtacaatgtcctcctgacagccgagaaaggcagacacaagagcaagcccgcacgtgtgaaggcatccactgaacaagcccctgagctggaaaacctcaccgtgactgaggttggctgggatggcctcagactcaactggaccgcggctgaccaggcctatgagcactttatcattcaggtgcaggaggccaacaaggtggaggcagctcggaacctcaccgtgcctggcagccttcgggctgtggacataccgggcctcaaggctgctacgccttatacagtctccatctatggggtgatccagggctatagaacaccagtgctctctgctgaggcctccacaggggaaactcccaatttgggagaggtcgtggtggccgaggtgggctgggatgccctcaaactcaactggactgctccagaaggggcctatgagtactttttcattcaggtgcaggaggctgacacagtagaggcagcccagaacctcaccgtcccaggaggactgaggtccacagacctgcctgggctcaaagcagccactcattataccatcaccatccgcggggtcactcaggacttcagcacaacccctctctctgttgaagtcttgacagaggaggttccagatatgggaaacctcacagtgaccgaggttagctgggatgctctcagactgaactggaccacgccagatggaacctatgaccagtttactattcaggtccaggaggctgaccaggtggaagaggctcacaatctcacggttcctggcagcctgcgttccatggaaatcccaggcctcagggctggcactccttacacagtcaccctgcacggcgaggtcaggggccacagcactcgaccccttgctgtagaggtcgtcacagaggatctcccacagctgggagatttagccgtgtctgaggttggctgggatggcctcagactcaactggaccgcagctgacaatgcctatgagcactttgtcattcaggtgcaggaggtcaacaaagtggaggcagcccagaacctcacgttgcctggcagcctcagggctgtggacatcccgggcctcgaggctgccacgccttatagagtctccatctatggggtgatccggggctatagaacaccagtactctctgctgaggcctccacagccaaagaacctgaaattggaaacttaaatgtttctgacataactcccgagagcttcaatctctcctggatggctaccgatgggatcttcgagacctttaccattgaaattattgattccaataggttgctggagactgtggaatataatatctctggtgctgaacgaactgcccatatctcagggctaccccctagtactgattttattgtctacctctctggacttgctcccagcatccggaccaaaaccatcagtgccacagccacgacagaggccctgccccttctggaaaacctaaccatttccgacattaatccctacgggttcacagtttcctggatggcatcggagaatgcctttgacagctttctagtaacggtggtggattctgggaagctgctggacccccaggaattcacactttcaggaacccagaggaagctggagcttagaggcctcataactggcattggctatgaggttatggtctctggcttcacccaagggcatcaaaccaagcccttgagggctgagattgttacagaagccgaaccggaagttgacaaccttctggtttcagatgccaccccagacggtttccgtctgtcctggacagctgatgaaggggtcttcgacaattttgttctcaaaatcagagataccaaaaagcagtctgagccactggaaataaccctacttgcccccgaacgtaccagggacttaacaggtctcagagaggctactgaatacgaaattgaactctatggaataagcaaaggaaggcgatcccagacagtcagtgctatagcaacaacagccatgggctccccaaaggaagtcattttctcagacatcactgaaaattcggctactgtcagctggagggcacccacggcccaagtggagagcttccggattacctatgtgcccattacaggaggtacaccctccatggtaactgtggacggaaccaagactcagaccaggctggtgaaactcatacctggcgtggagtaccttgtcagcatcatcgccatgaagggctttgaggaaagtgaacctgtctcagggtcattcaccacagctctggatggcccatctggcctggtgacagccaacatcactgactcagaagccttggccaggtggcagccagccattgccactgtggacagttatgtcatctcctacacaggcgagaaagtgccagaaattacacgcacggtgtccgggaacacagtggagtatgctctgaccgacctcgagcctgccacggaatacacactgagaatctttgcagagaaagggccccagaagagctcaaccatcactgccaagttcacaacagacctcgattctccaagagacttgactgctactgaggttcagtcggaaactgccctccttacctggcgacccccccgggcatcagtcaccggttacctgctggtctatgaatcagtggatggcacagtcaaggaagtcattgtgggtccagataccacctcctacagcctggcagacctgagcccatccacccactacacagccaagatccaggcactcaatgggcccctgaggagcaatatgatccagaccatcttcaccacaattggactcctgtaccccttccccaaggactgctcccaagcaatgctgaatggagacacgacctctggcctctacaccatttatctgaatggtgataaggctcaggcgctggaagtcttctgtgacatgacctctgatgggggtggatggattgtgttcctgagacgcaaaaacggacgcgagaacttctaccaaaactggaaggcatatgctgctggatttggggaccgcagagaagaattctggcttgggctggacaacctgaacaaaatcacagcccaggggcagtacgagctccgggtggacctgcgggaccatggggagacagcctttgctgtctatgacaagttcagcgtgggagatgccaagactcgctacaagctgaaggtggaggggtacagtgggacagcaggtgactccatggcctaccacaatggcagatccttctccacctttgacaaggacacagattcagccatcaccaactgtgctctgtcctacaaaggggctttctggtacaggaactgtcaccgtgtcaacctgatggggagatatggggacaataaccacagtcagggcgttaactggttccactggaagggccacgaacactcaatccagtttgctgagatgaagctgagaccaagcaacttcagaaatcttgaaggcaggcgcaaacgggcataaattggagggaccactgggtgagagaggaataaggcggcccagagcgaggaaaggattttaccaaagcatcaatacaaccagcccaaccatcggtccacacctgggcatttggtgagaatcaaagctgaccatggatccctggggccaacggcaacagcatgggcctcacctcctctgtgatttctttctttgcaccaaagacatcagtctccaacatgtttctgttttgttgtttgattcagcaaaaatctcccagtgacaacatcgcaatagttttttacttctcttaggtggctctgggatgggagaggggtaggatgtacaggggtagtttgttttagaaccagccgtattttacatgaagctgtataattaattgtcattatttttgttagcaaagattaaatgtgtcattggaagccatccctttttttacatttcatacaacagaaaccagaaaagcaatactgtttccattttaaggatatgattaatattattaatataataatgatgatgatgatgatgaaaactaaggatttttcaagagatctttctttccaaaacatttctggacagtacctgattgtattttttttttaaataaaagcacaagtacttttgaaaaaaaaccggaattc

SEQ ID NO: 821 - DNA, 3654 bp, Homo sapiens
gtcgtagcaagagtctcgaccactgaatggaagaaaaggacttttaaccaccattttgtgacttacagaaaggaatttgaataaagaaaactatgatacttcaggcccatcttcactccctgtgtcttcttatgctttatttggcaactggatatggccaagaggggaagtttagtggacccctgaaacccatgacattttctatttatgaaggccaagaaccgagtcaaattatattccagtttaaggccaatcctcctgctgtgacttttgaactaactggggagacagacaacatatttgtgatagaacgggagggacttctgtattacaacagagccttggacagggaaacaagatctactcacaatctccaggttgcagccctggacgctaatggaattatagtggagggtccagtccctatcaccataaaagtgaaggacatcaacgacaatcgacccacgtttctccagtcaaagtacgaaggctcagtaaggcagaactctcgcccaggaaagcccttcttgtatgtcaatgccacagacctggatgatccggccactcccaatggccagctttattaccagattgtcatccagcttcccatgatcaacaatgtcatgtactttcagatcaacaacaaaacgggagccatctctcttacccgagagggatctcaggaattgaatcctgctaagaatccttcctataatctggtgatctcagtgaaggacatgggaggccagagtgagaattccttcagtgataccacatctgtggatatcatagtgacagagaatatttggaaagcaccaaaacctgtggagatggtggaaaactcaactgatcctcaccccatcaaaatcactcaggtgcggtggaatgatcccggtgcacaatattccttagttgacaaagagaagctgccaagattcccattttcaattgaccaggaaggagatatttacgtgactcagcccttggaccgagaagaaaaggatgcatatgttttttatgcagttgcaaaggatgagtacggaaaaccactttcatatccgctggaaattcatgtaaaagttaaagatattaatgataatccacctacatgtccgtcaccagtaaccgtatttgaggtccaggagaatgaacgactgggtaacagtatcgggacccttactgcacatgacagggatgaagaaaatactgccaacagttttctaaactacaggattgtggagcaaactcccaaacttcccatggatggactcttcctaatccaaacctatgctggaatgttacagttagctaaacagtccttgaagaagcaagatactcctcagtacaacttaacgatagaggtgtctgacaaagatttcaagaccctttgttttgtgcaaatcaacgttattgatatcaatgatcagacccccatctttgaaaaatcagattatggaaacctgactcttgctgaagacacaaacattgggtccaccatcttaaccatccaggccactgatgctgatgagccatttactgggagttctaaaattctgtatcatatcataaagggagacagtgagggacgcctgggggttgacacagatccccataccaacaccggatatgtcataattaaaaagcctcttgattttgaaacagcagctgtttccaacattgtgttcaaagcagaaaatcctgagcctctagtgtttggtgtgaagtacaatgcaagttcttttgccaagttcacgcttattgtgacagatgtgaatgaagcacctcaattttcccaacacgtattccaagcgaaagtcagtgaggatgtagctataggcactaaagtgggcaatgtgactgccaaggatccagaaggtctggacataagctattcactgaggggagacacaagaggttggcttaaaattgaccacgtgactggtgagatctttagtgtggctccattggacagagaagccggaagtccatatcgggtacaagtggtggccacagaagtaggggggtcttccttgagctctgtgtcagagttccacctgatccttatggatgtgaatgacaaccctcccaggctagccaaggactacacgggcttgttcttctgccatcccctcagtgcacctggaagtctcattttcgaggctactgatgatgatcagcacttatttcggggtccccattttacattttccctcggcagtggaagcttacaaaacgactgggaagtttccaaaatcaatggtactcatgcccgactgtctaccaggcacacagagtttgaggagagggagtatgtcgtcttgatccgcatcaatgatgggggtcggccacccttggaaggcattgtttctttaccagttacattctgcagttgtgtggaaggaagttgtttccggccagcaggtcaccagactgggatacccactgtgggcatggcagttggtatactgctgaccacccttctggtgattggtataattttagcagttgtgtttatccgcataaagaaggataaaggcaaagataatgttgaaagtgctcaagcatctgaagtcaaacctctgagaagctgaatttgaaaaggaatgtttgaatttatatagcaagtgctatttcagcaacaaccatctcatcctattacttttcatctaacgtgcattataattttttaaacagatattccctcttgtcctttaatatttgctaaatatttcttttttgaggtggagtcttgctctgtcgcccaggctggagtacagtggtgtgatcccagctcactgcaacctccgcctcctgggttcacatgattctcctgcctcagcttcctaagtagctgggtttacaggcacccaccaccatgcccagctaatttttgtatttttaatagagacggggtttcgccatttggccaggctggtcttgaactcctgacgtcaagtgatctgcctgccttggtctcccaatacaggcatgaaccactgcacccacctacttagatatttcatgtgctatagacattagagagatttttcatttttccatgacatttttcctctctgcaaatggcttagctacttgtgtttttcccttttggggcaagacagactcattaaatattctgtacattttttctttatcaaggagatatatcagtgttgtctcatagaactgcctggattccatttatgttttttctgattccatcctgtgtccccttcatccttgactcctttggtatttcactgaatttcaaacatttgtcagagaagaaaaacgtgaggactcaggaaaaataaataaataaaagaacagccttttcccttagtattaacagaaatgtttctgtgtcattaaccatctttaatcaatgtgacatgttgctctttggctgaaattcttcaacttggaaatgacacagacccacagaaggtgttcaaacacaacctactctgcaaaccttggtaaaggaaccagtcagctggccagatttcctcactacctgccatgcatacatgctgcgcatgttttcttcattcgtatgttagtaaagttttggttattatatatttaacatgtggaagaaaacaagacatgaaaagagtggtgacaaatcaagaataaacactggttgtagtc

SEQ ID NO: 822 - DNA, 2808 bp, Homo sapiens
cggcatgagaggccagcctgccagggaaatccaggaatctgcaacaaaaacgatgacagtctgaaatactctctggtgccaacctccaaattctcgtctgtcacttcagacccccactagttgacagagcagcagaatatcaactccagtagacttgaatgtgcctctgggcaaagaagcagagctaacgaggaaagggatttaaagagtttttcttgggtgtttgtcaaacttttattccctgtctgtgtgcagaggggattcaacttcaattttctgcagtggctctgggtccagccccttacttaaagatctggaaagcatgaagactgggccttttttcctatgtctcttgggaactgcagctgcaatcccgacaaatgcaagattattatctgatcattccaaaccaactgctgaaacggtagcacctgacaacactgcaatccccagtttatgggctgaagctgaagaaaatgaaaaagaaacagcagtatccacagaagacgattcccaccataaggctgaaaaatcatcagtactaaagtcaaaagaggaaagccatgaacagtcagcagaacagggcaagagttctagccaagagctgggattgaaggatcaagaggacagtgatggtcacttaagtgtgaatttggagtatgcaccaactgaaggtacattggacataaaagaagatatgattgagcctcaggagaaaaaactctcagagaacactgattttttggctcctggtgttagttccttcacagattctaaccaacaagaaagtatcacaaagagagaggaaaaccaagaacaacctagaaattattcacatcatcagttgaacaggagcagtaaacatagccaaggcctaagggatcaaggaaaccaagagcaggatccaaatatttccaatggagaagaggaagaagaaaaagagccaggtgaagttggtacccacaatgataaccaagaaagaaagacagaattgcccagggagcatgctaacagcaagcaggaggaagacaatacccaatctgatgatattttggaagagtctgatcaaccaactcaagtaagcaagatgcaggaggatgaatttgatcagggtaaccaagaacaagaagataactccaatgcagaaatggaagaggaaaatgcatcgaacgtcaataagcacattcaagaaactgaatggcagagtcaagagggtaaaactggcctagaagctatcagcaaccacaaagagacagaagaaaagactgtttctgaggctctgctcatggaacctactgatgatggtaataccacgcccagaaatcatggagttgatgatgatggcgatgatgatggcgatgatggcggcactgatggccccaggcacagtgcaagtgatgactacttcatcccaagccaggcctttctggaggccgagagagctcaatccattgcctatcacctcaaaattgaggagcaaagagaaaaagtacatgaaaatgaaaatataggtaccactgagcctggagagcaccaagaggccaagaaagcagagaactcatcaaatgaggaggaaacgtcaagtgaaggcaacatgagggtgcatgctgtggattcttgcatgagcttccagtgtaaaagaggccacatctgtaaggcagaccaacagggaaaacctcactgtgtctgccaggatccagtgacttgtcctccaacaaaaccccttgatcaagtttgtggcactgacaatcagacctatgctagttcctgtcatctattcgctactaaatgcagactggaggggaccaaaaaggggcatcaactccagctggattattttggagcctgcaaatctattcctacttgtacggactttgaagtgattcagtttcctctacggatgagagactggctcaagaatatcctcatgcagctttatgaagccaactctgaacatgctggttatctaaatgagaagcagagaaataaagtcaagaaaatttacctggatgaaaagaggcttttggctggggaccatcccattgatcttctcttaagggactttaagaaaaactaccacatgtatgtgtatcctgtgcactggcagtttagtgaacttgaccaacaccctatggatagagtcttgacacattctgaacttgctcctctgcgagcatctctggtgcccatggaacactgcataacccgtttctttgaggagtgtgaccccaacaaggataagcacatcaccctgaaggagtggggccactgctttggaattaaagaagaggacatagatgaaaatctcttgttttgaacgaagattttaaagaactcaactttccagcatcctcctctgttctaaccacttcagaaatatatgcagctgtgatacttgtagatttatatttagcaaaatgttagcatgtatgacaagacaatgagagtaattgcttgacaacaacctatgcaccaggtatttaacattaactttggaaacaaaaatgtacaattaagtaaagtcaacatatgcaaaatactgtacattgtgaacagaagtttaattcatagtaatttcactctctgcattgacttatgagataattaatgattaaactattaatgataaaaataatgcatttgtattgttcataatatcatgtgcacttcaagaaaatggaatgctactcttttgtggtttacgtgtattattttcaatatcttaataccctaataaagagtccataaaaatccaaaaaaaaaaaaaaaaaaaaaaaaaaaaaaaaaaaaaaaaaaaaaaaaaaaaaa

SEQ ID NO: 823 - DNA, 511 bp, Homo sapiens
  misc_feature (1)...(511): n=a,t,g or c
cccgatttctcccggaacctctgctcagcctggtgaaccacacaggccagcgctctgacatgcagaaggtgaccctgggcctgcttgtgttcctggcaggctttcctgtcctggacgccaatgacctagaagataaaaacagtcctttctactatgactggcacagcctccaggttggcgggctcatctgcgctggggttctgtgcgccatgggcatcatcatcgtcatgagtgcaaaatgcaaatgcaagtttggccagaagtccggtcaccatccaggggagactccacctctcatcaccccaggctcagcccaaagctgatgaggacagaccagctgaaattgggtggaggaccgttctctgtccccaggtcctgtctctgcacagaaacttgaactccaggatggaattcttcctcctctgctgggactcctttgcatggcagggcctcatctcacctctcgcaagagggtctctttgttcaattttttttaatctaaaatgattan

SEQ ID NO: 824 - DNA, 2292 bp, Homo sapiens
ccatgggttccccttcagcctgtccatacagagtgtgcattccctggcaggggctcctgctcacagcctcgcttttaaccttctggaacctgccaaacagtgcccagaccaatattgatgtcgtgccgttcaatgtcgcagaagggaaggaggtccttctagtagtccataatgagtcccagaatctttatggctacaactggtacaaaggggaaagggtgcatgccaactatcgaattataggatatgtaaaaaatataagtcaagaaaatgccccagggcccgcacacaacggtcgagagacaatataccccaatggaaccctgctgatccagaacgttacccacaatgacgcaggattctataccctacacgttataaaagaaaatcttgtgaatgaagaagtaaccagacaattctacgtattctcggagccacccaagccctccatcaccagcaacaacttcaatccggtggagaacaaagatattgtggttttaacctgtcaacctgagactcagaacacaacctacctgtggtgggtaaacaatcagagcctcctggtcagtcccaggctgctgctctccactgacaacaggaccctcgttctactcagcgccacaaagaatgacataggaccctatgaatgtgaaatacagaacccagtgggtgccagccgcagtgacccagtcaccctgaatgtccgctatgagtcagtacaagcaagttcacctgacctctcagctgggaccgctgtcagcatcatgattggagtactggctgggatggctctgatatagcagccttggtgtagtttctgcatttcgggaagagtgtttttattatccacctgcagactggactggattcttctagctccttcaatcccattttctcctgtggcatcactaagtataagacctgctctcttcctgaagacctataagctggaggtggacaactcaatgtaaatttcaaggaaaaaccctcatgcctgagatgtgggccactcagagctaaccaaaatgttcaacaccataactagagacactcaaattgccaaccaggacaagaagttgatgacttcatgctgtggacagtttttcccaagatgtcccaagcctcatcgtgacgaggctcttatcccactccatttttccctgctcatgcctgcctctttaatttggtaagataatgctgtaactagaatttcacaatcagcgccttgtgcaggcaatttgacagagtgttggatgtgtcatgtcatcatgtcaaacccaaatatttgacctaagggatcctttattctgcccagtggctaactttaacaacatccctaatacaactgtttattcaaatgcacggtggtccctgttagagttagacctctagactcacctgttctcacgccctgttttaatttaacccagctatgggatgccagataacagaattgctgcctacgagctgaacagggaggagtttgtgcagttgctgacacttcttgttgcacataaataaatacagtgggtactatagagactcagttgcaaaaattaacaaatatgctgcttgattaaaatgggtaggcttctcatgtggctcattctttaatctattctcttttatttggtttggttcatggggtctctgcctatggatcatacttcaaactcttggtgtgatcctcctgattgtcacaatattagttaccctggtgtgctgtattctctaaaacctttaaatgtttgcatgcagccattcgtcaaatgtcaaatattctctctttggctggaatgacaaaaactcaaataaatgtatgattaggaggacatcataacctatgaatgatggaagtccaaaatgatggtaactgacagtagtgttaatgccttatgtttagtcaaactctcatttaggtgacagcctggtgactccagaatggagccagtcatgctaaatgccatatactcacactgaaacatgaggaagcaggtagatcccagaacagacaaaactttcctaaaaacatgagagtccaggctgtctgagtcagcacagtaagaaagtcctttctgctttaactcttagaaaaaagtaatatgaagtattctgaaattaaccaatcagtttatttaaatcaatttatttatattcttctgttcctggattcccattttacaaaacccactgttctactgttgtattgcccagtaggagctatcactatattttgcagaatggaaactgccctgactcttgaatcacaaataaaagccaattgtatctgtt

SEQ ID NO: 825 - DNA, 1523 bp, Homo sapiens
gtgccgattcctgccctgccccgaccgccagcgcgaccatgtcccatcactgggggtacggcaaacacaacggacctgagcactggcataaggacttccccattgccaagggagagcgccagtcccctgttgacatcgacactcatacagccaagtatgacccttccctgaagcccctgtctgtttcctatgatcaagcaacttccctgaggatcctcaacaatggtcatgctttcaacgtggagtttgatgactctcaggacaaagcagtgctcaagggaggacccctggatggcacttacagattgattcagtttcactttcactggggttcacttgatggacaaggttcagagcatactgtggataaaaagaaatatgctgcagaacttcacttggttcactggaacaccaaatatggggattttgggaaagctgtgcagcaacctgatggactggccgttctaggtatttttttgaaggttggcagcgctaaaccgggccttcagaaagttgttgatgtgctggattccattaaaacaaagggcaagagtgctgacttcactaacttcgatcctcgtggcctccttcctgaatccctggattactggacctacccaggctcactgaccacccctcctcttctggaatgtgtgacctggattgtgctcaaggaacccatcagcgtcagcagcgagcaggtgttgaaattccgtaaacttaacttcaatggggagggtgaacccgaagaactgatggtggacaactggcgcccagctcagccactgaagaacaggcaaatcaaagcttccttcaaataagatggtcccatagtctgtatccaaataatgaatcttcgggtgtttccctttagctaagcacagatctaccttggtgatttggaccctggttgctttgtgtctagttttctagacccttcatctcttacttgatagacttactaataaaatgtgaagactagaccaattgtcatgcttgacacaactgctgtggctggttggtgctttgtttatggtagtagtttttctgtaacacagaatataggataagaaataagaataaagtaccttgactttgttcacagcatgtaggtgatgagcactcacaattgttgactaaaatgctgcttttaaaacataggaaagtagaatggttgagtgcaaatccatagcacaagataaattgagctagttaaggcaaatcaggtaaaatagtcatgattctatgtaatgtaaaccagaaaaaataaatgttcatgatttcaagatgttatattaaagaaaaactttaaaaattattatatatttatagcaaagttatcttaaatatgaattctgttgtaatttaatgacttttgaattacagagatataaatgaagtattatctgtaaaaattgttataattagagttgtgatacagagtatatttccattcagacaatatatcataacttaataaatattgtattttagatatattctctaataaaattcagaattct

SEQ ID NO: 826 - DNA, 2786 bp, Homo sapiens
agcactctccagcctctcaccgcaaaattacacaccccagtacaccagcagaggaaacttataacctcgggaggcgggtccttcccctcagtgcggtcacatacttccagaagagcggaccagggctgctgccagcacctgccactcagagcgcctctgtcgctgggacccttcagaactctctttgctcacaagttaccaaaaaaaaaagagccaacatgttggtattgctggctggtatctttgtggtccacatcgctactgttattatgctatttgttagcaccattgccaatgtctggttggtttccaatacggtagatgcatcagtaggtctttggaaaaactgtaccaacattagctgcagtgacagcctgtcatatgccagtgaagatgccctcaagacagtgcaggccttcatgattctctctatcatcttctgtgtcattgccctcctggtcttcgtgttccagctcttcaccatggagaagggaaaccggttcttcctctcaggggccaccacactggtgtgctggctgtgcattcttgtgggggtgtccatctacactagtcattatgcgaatcgtgatggaacgcagtatcaccacggctattcctacatcctgggctggatctgcttctgcttcagcttcatcatcggcgttctctatctggtcctgagaaagaaataaggccggacgagttcatggggatctggggggtggggaggaggaagccgttgaatctgggagggaagtggaggttgctgtacaggaaaaaccgagataggggaggggggagggggaagcaaaggggggaggtcaaatcccaaaccattactgaggggattctctactgccaagcccctgccctggggagaaagtagttggctagtactttgatgctcccttgatggggtccagagagcctccctgcagccaccagacttggcctccagctgttcttagtgacacacactgtctggggccccatcagctgccacaacaccagccccacttctgggtcatgcactgaggtccacagacctactgcactgagttaaaatagcggtacaagttctggcaagagcagatactgtctttgtgctgaatacgctaagcctggaagccatcctgcccttctgacccaaagcaaaacatcacattccagtctgaagtgcctactggggggctttggcctgtgagccattgtccctctttggaacagatatttagctctgtggaattcagtgacaaaatgggaggaggaaagagagtttgtaaggtcatgctggtgggttagctaaaccaagaaggagaccttttcacaatggaaaacctgggggatggtcagagcccagtcgagacctcacacacggctgtccctcatggagacctcatgccatggtctttgctaggcctcttgctgaaagccaaggcagctcttctggagtttctctaaagtcactagtgaacaattcggtggtaaaagtaccacacaaactatgggatccaaggggcagtcttgcaacagtgccatgttagggttatgtttttaggattcccctcaatgcagtcagtgtttcttttaagtatacaacaggagagagatggacatggctcattgtagcacaatcctattactcttcctctaacatttttgaggaagttttgtctaattatcaatattgaggatcagggctcctaggctcagtggtagctctggcttagacaccacctggagtgatcacctcttggggaccctgcctatcccacttcacaggtgaggcatggcaattctggaagctgattaaaacacacataaaccaaaaccaaacaacaggcccttgggtgaaaggtgctatataattgtgaagtattaagcctaccgtatttcagccatgataagaacagagtgcctgcattcccaggaaaatacgaaaatcccatgagataaataaaaatataggtgatgggcagatcttttctttaaaataaaaaagcaaaaactcttgtggtacctagtcagatggtagacgagctgtctgctgccgcaggagcacctctatacaggacttagaagtagtatgttattcctggttaagcaggcattgctttgccctggagcagctattttaagccatctcagattctgtctaaaggggttttttgggaagacgttttctttatcgccctgagaagatctaccccagggagaatctgagacatcttgcctacttttctttattagctttctcctcatccatttcttttatacctttcctttttggggagttgttatgccatgatttttggtatttatgtaaaaggattattactaattctatttctctatgtttattctagttaaggaaatgttgagggcaagccaccaaattacctaggctgaggttagagagattggccagcaaaaactgtgggaagatgaactttgtcattatgatttcattatcacatgattatagaaggctgtcttagtgcaaaaaacatacttacatttcagacatatccaaagggaatactcacattttgttaagaagttgaactatgactggagtaaaccatgtattcccttatcttttactttttttctgtgacatttatgtctcatgtaatttgcattactctggtggattgttctagtactgtattgggcttcttcgttaatagattatttcatatactataattgtaaatattttgatacaaatgtttataactctagggatataaaaacagattctgattcccttcaaaaaaaaaaaa

SEQ ID NO: 827 - DNA, 863 bp, Homo sapiens; identical to SEQ ID NO: 322

SEQ ID NO: 828 - DNA, 2191 bp, Homo sapiens
tcgagcggccacccgggcaggtctctgggtgaatagcagcgtgtccgccggcagcgaaccgagaccagcgagccgaccatgcggctgcacagacttcgtgcgcggctgagcgcggtggcctgtgggcttctgctgcttcttgtccggggccagggccaggactcagccagtcccatccggaccacacacacggggcaggtgctggggagtcttgtccatgtgaagggcgccaatgccggggtccaaaccttcctgggaattccatttgccaagccacctctaggtccgctgcgatttgcaccccctgagccccctgaatcttggagtggtgtgagggatggaaccacccatccggccatgtgtctacaggacctcaccgcagtggagtcagagtttcttagccagttcaacatgaccttcccttccgactccatgtctgaggactgcctgtacctcagcatctacacgccggcccatagccatgaaggctctaacctgccggtgatggtgtggatccacggtggtgcgcttgtttttggcatggcttccttgtatgatggttccatgctggctgccttggagaacgtggtggtggtcatcatccagtaccgcctgggtgtcctgggcttcttcagcactggagacaagcacgcaaccggcaactggggctacctggaccaagtggctgcactacgctgggtccagcagaatatcgcccactttggaggcaaccctgaccgtgtcaccatttttggcgagtctgcgggtggcacgagtgtgtcttcgcttgttgtgtcccccatatcccaaggactcttccacggagccatcatggagagtggcgtggccctcctgcccggcctcattgccagctcagctgatgtcatctccacggtggtggccaacctgtctgcctgtgaccaagttgactctgaggccctggtgggctgcctgcggggcaagagtaaagaggagattcttgcaattaacaagcctttcaagatgatccccggagtggtggatggggtcttcctgcccaggcacccccaggagctgctggcctctgccgactttcagcctgtccctagcattgttggtgtcaacaacaatgaattcggctggctcatccccaaggtcatgaggatctatgatacccagaaggaaatggacagagaggcctcccaggctgctctgcagaaaatgttaacgctgctgatgttgcctcctacatttggtgacctgctgagggaggagtacattggggacaatggggatccccagaccctccaagcgcagttccaggagatgatggcggactccatgtttgtgatccctgcactccaagtagcacattttcagtgttcccgggcccctgtgtacttctacgagttccagcatcagcccagctggctcaagaacatcaggccaccgcacatgaaggcagaccatggtgatgagcttccttttgttttcagaagtttctttgggggcaactacattaaattcactgaggaagaggagcagctaagcaggaagatgatgaagtactgggccaactttgcgagaaatgggaaccccaatggcgagggtctgccacactggccgctgttcgaccaggaggagcaatacctgcagctgaacctacagcctgcggtgggccgggctctgaaggcccacaggctccagttctggaagaaggcgctgccccaaaagatccaggagctcgaggagcctgaagagagacacacagagctgtagctccctgtgccggggaggagggggtgggttcgctgacaggcgagggtcagcctgctgtgcccacacacacccactaaggagaaagaagttgattccttcattcacttcgccattcattcatacttccgtccagaagttgattccttcattcacttcgccattcattcatacttccgtccatccattcagaaaccggyatttattaagaatttactcaggcatgatggcccatacttgtaatcccagctattgggaaggatgagatgggaggatggcttgaggccagaggtttgagaccgaccagccagggcaacacagtgagaccccttctcaaaaaaaaaaaaaaaaaaagagagagtgtgtgattagaagctaaataggaaagttttgagcttcaagtcagtgaggagtaaaaaagatttttaaaaagcaa

SEQ ID NO: 829 - DNA, 2191 bp, Homo sapiens; identical to SEQ ID NO: 828

SEQ ID NO: 830 - DNA, 2038 bp, Homo sapiens
gcaggcccgttggaagtggttgtgacaaccccagcaatgtggagaagcctggggcttgccctggctctctgtctcctcccatcgggaggaacagagagccaggaccaaagctccttatgtaagcaacccccagcctggagcataagagatcaagatccaatgctaaactccaatggttcagtgactgtggttgctcttcttcaagccagctgatacctgtgcatcatcgaggcatctaaattagaagacctgcgagtaaaactgaagaaagaaggatattctaatatttcttatattgttgttaatcatcaaggaatctcttctcgattaaaatacacacatcttaagaataaggtttcagagcatattcctgtttatcaacaagaagaaaaccaaacagatgtctggactcttttaaatggaagcaaagatgacttcctcatatatgatagatgtggccgtcttgtatatcatcttggtttgcctttttccttcctaactttcccatatgtagaagaagccattaagattgcttactgtgaaaagaaatgtggaaactgctctctcacgactctcaaagatgaagacttttgtaaacgtgtatctttggctactgtggataaaacagttgaaactccatcgcctcattaccatcatgagcatcatcacaatcatggacatcagcaccttggcagcagtgagctttcagagaatcagcaaccaggagcaccaaatgctcctactcatcctgctcctccaggccttcatcaccaccataagcacaagggtcagcataggcagggtcacccagagaaccgagatatgccagcaagtgaagatttacaagatttacaaaagaagctctgtcgaaagagatgtataaatcaattactctgtaaattgcccacagattcagagttggctcctaggagctgatgctgccattgtcgacatctgatatttgaaaaaacagggtctgcaatcacctgacagtgtaaagaaaacctcccatctttatgtagctgacagggacttcgggcagaggagaacataactgaatcttgtcagtgacgtttgcctccagctgcctgacaaataagtcagcagcttatacccacagaagccagtgccagttgacgctgaaagaatcaggcaaaaaagtgagaatgaccttcaaactaaatatttaaaataggacatactccccaatttagtctagacacaatttcatttccagcatttttataaactaccaaattagtgaaccaaaaatagaaattagatttgtgcaaacatggagaaatctactgaattggcttccagattttaaattttatgtcatagaaatattgactcaaaccatattttttatgatggagcaactgaaaggtgattgcagcttttggttaatatgtctttttttttctttttccagtgttctatttgctttaatgagaatagaaacgtaaactatgacctaggggttttctgttggataattagcagtttagaatggaggaagaacaacaaagacatgctttccattttttcctttacttatctctcaaaacaatattactttgtcttttcaatcttctacttttaactaataaaataagtggattttgtattttaagatccagaaatacttaacacgtgaatattttgctaaaaaagcatatataactattttaaatatccatttatcttttgtatatctaagactcatcctgatttttactatcacacatgaataaaggcctttgtatctttctttctctaatgttgtatcatactcttctaaaacttgagtggctgtcttaaaagatataaggggaaagataatattgtctgtctctatattgcttagtaagtatttccatagtcaatgatggtttaataggtaaaccaaaccctataaacctgacctcctttatggttaatactattaagcaagaatgcagtacagaattggatacagtacggatttgtccaaataaattcaataaaaaccttaaaaaaaaaaaaaaaaaaaaaa

SEQ ID NO: 831 - DNA, 3270 bp, Homo sapiens
  misc_feature (1)...(3270): n=a,t,g or c
caaaaagtgtgtggaaaggtggattgagggagcgggacccccgcgggacccgagggggcggcaggcggggaacggggagtcagcccgcgctgtgtctcggggccggccggcaggaaggagccatggctctggacgggataaggatgccagatggctgctacgcggacgggacgtgggaactgagtgtccatgtgacggacctgaaccgcgatatcaccctgagagtgaccggcgaggtgcacattggaggcgtgatgcttaagctggtggagaaactcgatgtaaaaaaagattggtctgaccatgctctctggtgggaaaagaagagaacttggcttctgaagacacattggaccttagataagtatggtattcaggcagatgctaagcttcagttcacccctcagcacaaactgctccgcctgcagcttcccaacatgaagtatgtgaaggtgaaagtgaatttctctgatagagtcttcaaagctgtttctgacatctgtaagacttttaatatcagacaccccgaagaactttctctcttaaagaaacccagagatccaacaaagaaaaaaaagaagaagctagatgaccagtctgaagatgaggcacttgaattagaggggcctcttatcactcctggatcaggaagtatatattcaagcccaggactgtatagtaaaacaatgacccccacttatgatgctcatgatggaagccccttgtcaccaacttctgcttggtttggtgacagtgctttgtcagaaggcaatcctggtatacttgctgtcagtcaaccaatcacgtcaccagaaatcttggcaaaaatgttcaagcctcaagctcttcttgataaagcaaaaatcaaccaaggatggcttgattcctcaagatctctcatggaacaagatgtgaaggaaaatgaggccttgctgctccgattcaagtattacagcttttttgatttgaatccaaagtatgatgcaatcagaatcaatcagctttatgagcaggccaaatgggccattctcctggaagagattgaatgcacagaagaagaaatgatgatgtttgcagccctgcagtatcatatcaataagctgtcaatcatgacatcagagaatcatttgaacaacagtgacaaagaagttgatgaagttgatgctgccctttcagacctggagattactctggaagggggtaaaacgtcaacaattttgggtgacattacttccattcctgaacttgctgactacattaaagttttcaagccaaaaaagctgactctgaaaggttacaaacaatattggtgcaccttcaaagacacatccatttcttgttataagagcaaagaagaatccagtggcacaccagctcatcagatgaacctcaggggatgtgaagttaccccagatgtaaacatttcaggccaaaaatttaacattaaactcctgattccagttgcagaaggcatgaatgaaatctggcttcgttgtgacaatgaaaaacagtatgcacactggatggcagcctgcagattagcctccaaaggcaagaccatggcggacagttcttacaacttagaagttcagaatattctttcctttctgaagatgcagcatttaaacccagatcctcagttaataccagagcagatcacgactgatataactcctgaatgtttggtgtctccccgctatctaaaaaagtataagaacaagcagataacagcgagaatcttggaggcccatcagaatgtagctcagatgagtctaattgaagccaagatgagatttattcaagcttggcagtcactacctgaatttggcatcactcacttcattgcaaggttccaagggggcaaaaaagaagaacttattggaattgcatacaacagactgattcggatggatgccagcactggagatgcaattaaaacatggcgtttcagcaacatgaaacagtggaatgtcaactgggaaatcaaaatggtcaccgtagagtttgcagatgaagtacgattgtccttcatttgtactgaagtagattgcaaagtggttcatgaattcattggtggctacatatttctctcaacacgtgcaaaagaccaaaacgagagtttagatgaagagatgttctacaaacttaccagtggttgggtgtgaatagaaatactgtttaatgaaactccacggccataacaatatttaactttaaaagctgtttgttatatgctgcttaataaagtaagcttgaaatttatcattttatcatgaaaacttctttgccttaccagaccagttaatatgtgcactaaacaagcacgactattaatctatcatgttatgatataataaacttgaatttggcacacattccttagggccatgaattgaaaactgaaatagtgggcaaatcaggaacaaaccatcactgatttactgatttaagctagccaaactgtaagaaacaagccatctattttaaagctatccagggcttaacctatatgaactctatttatcatgtctaatgcatgtgatttaatgtatgtttaatttgatatcatgttttaaaatatcctacttctggtagccatttaattcctccccctacccccaaataaatcaggcatgcaggaggcctgatatttagtaatgtcattgtgtttgaccttgaaggaaaatgctattagtccgtcgtgcttnatttgtttttgtccttgaataagcatgttatgtatatngtctcgtgtttttatttttacaccatattgtattacacttttagtattcaccagcataancactgtctgcctaaaatatgcaactctttgcattacaatatgaagtaaagttctatgaagtatgcattttgtgtaactaatgtaaaaacacaaattttataaaattgtacagttttttaaaaactactcacaactagcagatggcttaaatgtagcaatctctgcgttaattaaatgcctttaagagatataattaacgtgcagttttaatatctactaaattaagaatgacttcattatgatcatgatttgccacaatgtccttaactctaatgcctggactggccatgttctagtctgttgcgctgttacaatctgtattggtgctagtcagaaaattcctagctcacatagcccaaaagggtgcgagggagaggtggattaccagtattgttcaataatccatggttcaaagactgtataaatgcattttattttaaataaaagcaaaacttttatttaaa

SEQ ID NO: 832 - DNA, 1569 bp, Homo sapiens
caaaatctcaaccatgatcttgagatggcaaaggttttaaatacgttttggaaatatactcattggtatatttcttttgagaaggctgaaatgtagctggggacagcaggttgatcacaagggacgatgatatgaggtaagcacacaagagctatggacaagacaaggtctaaaggattttgaatacaaagcagaaatatttcgaccttctcatttctggggtgggagtggggagtgttcattaagtacatatgacaagagggagtgtggggagaaggtgaaacagtagactacatttatggattaagtagggaatgtgaacaaagatgttaaagtcatggcgatccggtagacagattacacagaaggggaccgaagatgaactggacaaatactctgaggctctcaaagatgcccaggagaagctggagctggcagagaaaaaggccaccgatgctgaagccgacgtagcttctctgaacagacgcatccagctggttgaggaagagttggatcgtgcccaggagcgtctggcaacagctttgcagaagctggaggaagctgagaaggcagcagatgagagtgagagaggcatgaaagtcattgagagtcgagcccaaaaagatgaagaaaaaatggaaattcaggagatccaactgaaagaggccaagcacattgctgaagatgccgaccgcaaatatgaagaggtggcccgtaagctggtcatcattgagagcgacctggaacgtgcagaggagcgggctgagctctcagaaggccaagtccgacagctggaagaacaattaagaataatggatcagaccttgaaagcattaatggctgcagaggataagtactcgcagaaggaagacagatatgaggaagagatcaaggtcctttccgacaagctgaaggaggctgagactcgggctgagtttgcggagaggtcagtaactaaattggagaaaagcattgatgacttagaagagaaagtgctcatgccaaagaagaaaaccttagtatgcatcagatgctggatcagactttactggagttaaacaacatgtgaaaacctccttagctgcgaccacattctttcattttgttttgttttgttttgtttttaaacacctgcttaccccttaaatgcaatttatttacttttaccactgtcacagaaacatccacaagataccagctaggtcagggggtggggaaaacacatacaaaaagcaagcccatgtcagggcgatcctggttcaaatgtgccatttcccgggttgatgctgccacactttgtagagagtttagcaacacagtgtgcttagtcagtgtaggaatcctcactaaagcagaagaagttccattcctttctgattggcacacgtgcagctcatgacaatctgtaggataacaatcagtgtggatttccactcttttcagtccttcatgttaaagatttagacaccacatacaactggtaaaggacgttttcttgagagttttaactatatgtaaacattgtataatgatatggaataaaatgcacattttaggacattttctaaa

SEQ ID NO: 833 - DNA, 268 bp, Homo sapiens
aaaattaaatttctctttattcaattgcctctgagtagtgctgtgatttccaagtgccaggtagttaggtgtacaaatatacataccacagaaacatacagtttttaaaaaaattaagaaactggctgcatctgacgacatcaagaaaaaagataattctgattcaagggcttctccagaagatggggtttcattggcatgacgctcataggatgacctgtcatttttgtactattttttctagaaccatagagggatgacagtaact

SEQ ID NO: 834 - DNA, 265 bp, Homo sapiens
aatttgttcaattatttatttattgtggagtattttacatgcaagaacccaattagagagagggtatctggaaggagggccagtggggtggatggatgctctgagcctcgggtgcactgacccaccctccagaaccagctctgcccacagaaacacatgacagtgacaaaaacactaaacttctaggacgagtggacagcaaacgcgacattcaacacattcctcttttcagtagcccccaacaatcctgagaatcctcacaatt

SEQ ID NO: 835 - DNA, 254 bp, Homo sapiens
  misc_feature (1)...(254): n=a,t,g or c
aatgagtaatgaattattttaacttttatttgattattttcatttacagttctggcactgacactttttttaaaaaaagattttaattttatgtaaagattgancttcaataaaataacttaaaaaacatttacatgtatatcactaaatctccataaaatatacaatacttttgatacagcataggctaggatgactttgaaggaaatggtacatattcataatttttaagagatatcccatatatcgcttgt

SEQ ID NO: 836 - DNA, 307 bp, Homo sapiens; identical to SEQ ID NO: 327

SEQ ID NO: 837 - DNA, 4553 bp, Homo sapiens; identical to SEQ ID NO: 330

SEQ ID NO: 838 - DNA, 295 bp, Homo sapiens
tttggaagccatagaatttattcgaatttgcagaagcatgagataatgtaccacaaaagagtttgattttacaacataaagtatggtaggaagtggtcaatgtacacagtgttgtcagcaaaaaggggaggcagggcagtttcacattttttgaaaggtggtggacgacaactacacttgtccttaaagtaaaataaaagcaggagagacccagcagagaccaacctgatttgcagttagcatcagaatctaaatctagtatcacaactttaagaaactaaaagaaaactattag

SEQ ID NO: 839 - DNA, 484 bp, Homo sapiens
ttttttttttttttttaaatgcaacatacaaactttattgaacaaaagtaaactgtttcagtaaactcaaacaggcacttaagagaaaaactgactggaagaacttttatcttaaacatcttacagtaacctacttgcagttgcatttaactgagctctgttgctgtgaagaatacagctcatgcacaggtatggatgaaagatttgtacatttctcaagtattcactgaatactaccttatatacacatatacattaaatttgaaaaagatttgacgatccccagataaacttcatttttgttgatcttttggaagaggtcgtctaaagagaagaatatgtggttctggctcatgaatcatggtaatgaacccagcctagactctgttggacaccaagtctcctccactcctcttcagacatcagatgagttttaggtacttgtttggaaagttctctggggtaacataacatgccggtacta

SEQ ID NO: 840 - DNA, 439 bp, Homo sapiens
tttttttttggtttagaatgaagtttttttttttaattatttttcttggaagtagggaggatttgaaagcttgaaaatcaagaatcaaaagacagtgaatctagaaggcatctgggagcagaacagagattgaagacgggtgggcacaggagaaagcgccaccatcgatcccggctgctgccctggaaatgtgattttcttaatagctgagttcatggttgcttgaggtcaggcctggctattcatttccagcgatgtctgaccagagaggactcatcattgacgacctcagggtcacgggggcgacgctgacaccggaacggcagcagcagcaggacgattaagacaaggaggatggctccacagacgctcatgagcgccataggacacaatccacaaaatggggctcgctcaaagactgagcggggacacagtttct

SEQ ID NO: 841 - DNA, 322 bp, Homo sapiens
  misc_feature (1)...(322): n=a,t,g or c
tttttttttgtgggagacccatttaatgtggacactcaaggcctgggcagagtggggagcgcccaggagttgggtgggcaggcaagtgggtgggttgcaggcccactcttggccccaggangnatgccaggtggtgggggctggcccaggtaggcaagggganncccaggcaggaagggtggcccangcaggcagacccaccaggggtccctgaaggccagcccttgagaaggtgtctaaagccaagggggtgagtgcccaaggccangagcctaacccagnggaggcaanggtttgggtcccgntttgggggctcttngag

SEQ ID NO: 842 - DNA, 506 bp, Homo sapiens
  misc_feature (1)...(506): n=a,t,g or c
ctcangatcatgtttaattatntataaaagctctgnagtcaggtaatgtttttcatgtgcttctcttgngcagtctgaggagagaacaganacagaatccccttgggccttgagtagacgcagctggccatgtacaggcagtggctctgggtcagtgcaggaagcagagtcacagccagcgccttggggtggggatgaaaggagatgacctggtggttgcgtgacagccactgtaggactttgatctcagggggacaagctgacacaggcagctgggaattctgggcangggacaaagcaggcatcacatgaaagagtgataacccagtcttagttaaaacagtctcaggagtcaattgcangaaanccctttcccgactccctttgaccggattgataaggncaagcccaaggaaagtcagccccagcangaagccctccaacggccaattcnagcatcttgctctgggcnagtttaaanttgagncccgcaattcacggtgaat

SEQ ID NO: 843 - DNA, 547 bp, Homo sapiens
  misc_feature (1)...(843): n=a,t,g or c
aaaggaagagcttgatgatgtcatagcattagattgaacagaaatgcctctaaacagaaccctcttactatttagtttatctgggcagaaccagattgttatgtcctttgttccaaagggaaaaaattgacagcagtgacttgaaaatgattctgctccctttgaaagcattcattttgctagaactgttagacacattgcagtatgctgtattgaaagtaggaatatagttttaaaaaccctttgaacaaagtgtgtgcataaccagtcatgagataaaacaacacaatgcatgttgcctttttaatgtaaatacccttaggtatcattaatagtttcaaaatattgtggtttagtaaagttgatacctggttataaatattatgcctttatttttggctagaagaagaattatttttagcctagatctaaccattttcatactcttanctgattgaaacagatttcaaagaagtatcgagtgctatgcattganacttgttttnaaatggttagatggcactatgtatattaatgtaaancaatt

SEQ ID NO: 844 - DNA, 245 bp, Homo sapiens
  misc_feature (1)...(245): n=a,t,g or c
gaaagccctgtctactgtctggagttcaacagccagcagactcagctcttggctgcgggcgatgccagnggcacagtgaaggtgtggcagctgagcacagagttcacggaacaagggccccgggaagctgaggacctggactgcctggcagcagaggtggcggcctgaggggtcccgggaggcgggtgcaagccttcgctgtgccgagccttgtgtttctgacgcaagccaaatgaagaaaagca

SEQ ID NO: 845 - DNA, 272 bp, Homo sapiens
tttttgcaaatataagaagtaattttattgcaatatactgtggctagagtggtctggggagaacgggacacattttgaagttcagtacaaattataacaactttgaagggaccacagaggaagaaaatgacaggagaaaaggacaaattggatgggatgagaaatgaaaacagaatcacatgacctagacgcagccacgggggtcgcgggacagtcctcggctatggcttttcttttgaagagatgaaggtgacagtcattggcacatgcta

SEQ ID NO: 846 - DNA, 446 bp, Homo sapiens
  misc_feature (1)...(446): n=a,t,g or c
cagagagcaaatcccatttattggaatttcactgacaacaaattgagaggaaggcttccccctcccctgaaacatgccatcctctctgccctcaggntcnagcacagggataagaaccccactccgcatgtccccagaggcagcactccannngggtngggggnaggggaggggtgctctacgccaggctggggagctgggacaggagggaagacgtgcaccctcacctcttggctcaatccctctccccgggacctggtgctgcccccagtccctggggtgngctggnananngggctcatgcaacaattgagtagacaggaggtggcacggaaacgtggccttggtgccccttggcgggggcgggaggactaaaggggccatgctgtggccacagcgggtccaaatggaagtatctgcagtgtacatacaggagggttggagat

SEQ ID NO: 847 - DNA, 330 bp, Homo sapiens
  misc_feature (1)...(330): n=a,t,g or c
gtgtttactacaaactgtttaattgtttcttatcccaataactttacaaatatagaaccacatgctagtctgggggtgctgtgcagtgagtcactacaaactcgctcaggcacagcttaatgccgctgagatccatctaggagcagtcccagcggtggcctcagccagtngaggaagagggctttggaggagggctgccaagtgtggccaggggacccggcctcaggtctgtggaggtgcttcaacagcacgatgctcattctctgtccgtagtgtctccatatactttctcatcttctccaccatccaggagggtaggacaaaggattt

SEQ ID NO: 848 - DNA, 514 bp, Homo sapiens
ggcacgagcatagccccagcttgggtccaatccatctgtccctggcatgtgcttcatgtagtaggtgctttcctgatcccctttgcgagatgctgtgggtgctaacacctcagagctgtcctcttctctagagtggaggttttcaaagtgcatcatcagcattacctgtgaacttgctggaaatacaaatcctcaggccccacctcagacctactgaatcagaatctctgggggttggcacagcattctgatttaccaaaccctccaagtgattttgatgtattctaattttgagaccatctctaagaaaagaattgctacctcttgtatggaggtacaaaagactgacctcttacatcaaggaacttcctttcccagagctcctcatggaatcaagctgaagtcagtcttcttctgagagcacattcttactcagtttttttcctctgtcctacgctgcttccctcactccccttctcctaagagcactccatcaataaaccacttgcacgag

SEQ ID NO: 849 - DNA, 374 bp, Homo sapiens
gagaggtctgctactttattttgataatgcagggatattatttatctttgcagaatcaggtgactcccaacgttcccggaatcttctagtggtctgtgtcaggggtctgggctggctggggttcagtgatgtctactggaggcagcttccatgccttctggggtcctgagtctccatggcttgtggggtctgggtcccccctggattagtggatggccagagtggcatagacactgggctcagctggagaggccccttcctgggatggaggaggctcagttgccttctgtctgaagggtaaaagctgtgcagctgggcgtaggtcacatcctggggggcttcagatgcagcagcctcagtgtccatctgtctgt

SEQ ID NO: 850 - DNA, 482 bp, Homo sapiens
  misc_feature (1)...(482): n=a,t,g or c
gacgctgcaggtgctagcgctgctgggggccgcccatgaaagcgcngcantggcgcantcatgcaaacatagagaattctgggcttccacacaactccagtgctaactcaacagagactctccaacatgtgccttctgaccatacaaatgaaacttccaacagtactgtgaaaccaccaacttcagttgcctcagactccagtaatacaacggtcaccaccatgaaacctacagcggcatctaatacaacaacaccagggatggtctcaacaaatatgacttctaccaccttaaagtctacacccaaaacaacaagtgtttcacagaacacatctcagatatcaacatccacaatgaccgtaacccacaatagttcagtgacatctgctgcttcatcagtaacaatcacaacaactatgcattctgaagcaaagaaaggatcaaaatttgatactgggagctttgttggtggtattgtattt

SEQ ID NO: 851 - DNA, 415 bp, Homo sapiens
ttcttgctttctttaaatctttatttaaaagtccatgctaataatgtgtttacatttttacagttacattatgatagaaactgttggattttttaaatatctaaaacaatggcccactgaagaaaggaacaattaactctttaattaattccttaggataaatacccagaaatttaacagctagggcagacttctaatacaataccgaaagtccttccaaaaaccaagtggttgccaacttatgtcccttagcattataacattcttgagccaatagtgtaaaaatacgctgacaattttataggcaaacattactcaaggtatcttactttccacttattactaaaggtaattaacccctaaatagatgctcctcaacagtgggactacatcctggtaaacctatcataagttg

SEQ ID NO: 852 - DNA, 370 bp, Homo sapiens
gaaggctaaggcagtatctcgctcacagagagctggcctacaaggtgctggagctggcaggtaatgcttctaaggatctcaaagtaaagcgtatcactccgcgtcacttgcagcttgcaatccgtggtgatgaagagttggattctcttatcaaggctaccatagctgggggtggtgtgatccctcacatccacaaatctctgattggaaagagggacaccagaaaactgcttagagggatgctttaaccaccctcttctcccgtcaattgtactgtaactggggcaaagaaataatggggatatgtggattttacacagttaatggaagcatagcaatactgtgggatgttaaagaacattgtatgttc

SEQ ID NO: 853 - DNA, 316 bp, Homo sapiens
tctcacgctgcctctgtggttccctccctcatttttcctggacgtgatagctctgcctattgcaggacaatgatggctattctaaacgctaaggaaaaaaaacaaacacagaactgtttcaagtactcaagactgacttacagaccaaccaaccaccttgctggaacccttgctagcaggcattcttataaaagaaactttcgagcctccttatattgctggaactcagctgtgctccagactagagcctccttacctatctatatgtttaattaatttttctctatatcatgtactctgctttttttggtacagt

SEQ ID NO: 854 - DNA, 313 bp, Homo sapiens
ctggtgccggcgtttgggctacggttgttgttggcgactgtgcttcaagcgttgtctgcttttggggcagagttttcatcggaggcatgcagagagttaggcttttctagcaacttgctttgcagctcttgtgatcttctcggacagttcaacctgcttcagctggatcctgattgcagaggatgctgtcaggaggaggcacaatttgaaaccaaaagctgtatgcaggagctattcttgagtttgtggataaattgggaaggttcctcagtccagctttgttagggtgataaccaactgttcagaggctcaa

SEQ ID NO: 855 - DNA, 357 bp, Homo sapiens
gataattttaaagtgtctataattgcagtggtttatttgcaaaattcctaaaaggaaaaattttatcactgccatcacagcaggtttcctcatccagatgaggaaactagacaaatgctagtgtgttttaactagctaaacaaaactaagttaaatgaacatttaagagtttccctagcgggccattccttagcaaaatgttggaatccctgttgctacattgactaacaggtcatgatgaatggatatgtagacttggctcatagaacctaatcagatggttagaggtgttggcagtttaggacctcctgtcataaatgtgtgacaaccttttgtacctacctattgacctgcatg

SEQ ID NO: 856 - DNA, 264 bp, Homo sapiens
gcggtaacggggcagagaggctgttcgcagagctgcggaagatgaatgccagaggacttggatctgagctaaaggacagtattccagttactgaactttcagcaagtggaccttttgaaagtcatgatcttcttcggaaaggtttttcttgtgtgaaaaatgaacttttgcctagtcatccccttgaattatcagaaaaaaatttccagctcaaccaagataaatgatttttcacactgagaacattcagggtctatttgctcg

SEQ ID NO: 857 - DNA, 264 bp, Homo sapiens
agattattgtggatgatgatgacagtaagatatggtcgctctatgacgcgggcccccgaagtatcaggtgtcctctcatattcctgccccctgtcagtggactgcagatgtctttttccggcagattttggctctgactggatggggttaccgggttatcgctttgcagtatccagtttattgggaccatctcgagttctgtgatggattcagaaaacttttagaccatttacaattggataaagttcactttttggccttctt

SEQ ID NO: 858 - DNA, 444 bp, Homo sapiens
ttttctagtaagactagatttattcaataccctagtaaaagttttgattataagtatccaacagtataaaaagtacaaaacagatctgtagatttctaatatattaatacaaagtgcatgactacatacagtacatcctacaggcaaagagaggtggaaggggaaaaagaagactgtggttgaggtctagtaataaataaataaatacagaagtagagatgatccatattatagtatattctaccaccaatactgcagccaaaatgtacaaaaaaaatcatttcaaataactcaggaggatgataatggctggacttttgtaattcacctcaaagactgtgggagagccaactcaactcactgtatagtctgtgcatatggtggcttgtagcatgtaggttttttccaaaagaaggaaatataaaatgtttagattaagaacta

SEQ ID NO: 859 - DNA, 345 bp, Homo sapiens; identical to SEQ ID NO: 345

SEQ ID NO: 860 - DNA, 261 bp, Homo sapiens
gagggaaagacaaaacgtatttattccaggccaggtcttaaaatgcacactgcacggttccctgttgttatcagcaccagtaaggaaagaacgtgccttaacggcagccccacccagagcctgctgcgtggctgctgtgaggctccccatgaatccacgcagtcttcttcctcactggtgcagttggtgaggttttctaccctcacagcaaagggatccttaactataaattcacggtatgcagagaagaggacagaatct

SEQ ID NO: 861 - DNA, 445 bp, Homo sapiens
ttttttttttgtttacttatttatttattttcaccaccaacattattagccatgcctttctgctaatcgattttagcaagtcgaggtaaaacacatgcaacattttctggcaaaagcttaatgtcaaacaatatgtgatccatactgtgtgtcgtccttgggggtttatttgactttgtcacaatgacagccaacagtgagactgataagcctgtaaaaataaaaaaataagactaatcaaatagacatggcattttaatctcaaagtgcaaaatcatctaactgaaaatgacggcattgaaaaattccagtggttaaaaatgaatcaaaacttcattacgcaggcagtggaagtgtgttgaaagatttaccaggggtgtcaagttttagacactcagaaaggcaccattctagccatcttgattggataacatggtatatactt

SEQ ID NO: 862 - DNA, 446 bp, Homo sapiens
ggccctagagagtttattacaaaataagaaagagaagtctggggaaggttcactcatcatagaattttggcagttcattgcccaagatgactcgatggtccacaccggcagctgtaatagtgaccaggtagatgacacccccgcttgagccatcccggctcatggccagagcaatagcgtcatgtggtgaagcgcctgcactcctcgggagacatgcctggcttatatgctgcatccacataaccatagataaaggtgctgccggagccaccaatggcaaaaggctgtcgagtcagcattcctcccagggttccatatacctgacctccttcacgttggtcccagccagctaccatgagatgtgcagacaagtcctctcgattatttatagctgatatttctcaccacatttgcagcagccaaaacaagtggaggttcctccagtt

SEQ ID NO: 863 - DNA, 318 bp, Homo sapiens
tttgacaaaagcgtgcatttaatttgatgctttgcagagatacatgaccaaagttgtatgcatggcttgtcttttgggatggtcccagctgtttattttaaaagaaaaaaattaaaatagagccaacaaatgcaattaagaaaaaaaaagtattgagacacaaggggacctacatgttctggtctaagaagcatgcaagtattacaaagcattccagatacagtatgacagaggaacagtgaacaagcattggaacgatgctctttctttcagaaacgggaagtctaacagttatgttttcacaatggtagtgattaa

SEQ ID NO: 864 - DNA, 232 bp, Homo sapiens
ttttttttttttttttttttttttttttctcaatagataactttatttgaaatgaaatgcattttgaaaatatgaaaaataaatcacatctccccaaaatcatctaagagacatatttacacaagttctgaccatgctaaaaaattcatgaattgtgatggtgtataaagcatttggtacatgatgatacttgctttccagaagctggcatttgcatattataaaacgttaa

SEQ ID NO: 865 - DNA, 422 bp, Homo sapiens
  misc_feature (1)...(422): n=a,t,g or c
tgttttttttngtatttctcatgtatacttcatttattttattaatnancnaanccctgtaagggantnctttgcctagtcntccgactntgnttnatcttcatcttgactaatcnggaagtaacnaagtcgtaggtctccttgtcagatgcaancantcgaagccaatcacgaagattgttcttcttaaggtatttcttggtaaggtatttcaaataccttttagagaactgtttctcagaaacaactgtgattttattcttgaagcgttcaatgtgaacaacattcccgagatttccagttttgccattgactttaaccttctcccgtagaaattgctcaaaatttccagaatcaaaaattccatcttctactggatgagtaaggtccaaattaaacctccaggttgacctcttgggctt

SEQ ID NO: 866 - DNA, 607 bp, Homo sapiens
  misc_feature (1)...(607): n=a,t,g or c
ctaagtcagagccgcgatgttccggattgagggcctcgcgccgaagctggacccggagacgatgaaacggaagatgcgcgaggatgtgatctcctccatacggaactttctcatctacgtggccctcctgcgagtcactccatttatcttaaagaaattggacagcatatgaagacaggacatcacatatgaatgcacgatatgaagagcctggttacagtttcgactcctctctgcaagtgaataggcccagaaaggtgtaagagactctttgaatggacataaaattctgcttgttaagaacaagtttggctctggtaactgaccttcaaagctaaaatataaaactatttgggaagtatgaaacgatgtctcgtgatctggtgtacccttatccctgtgacgtttggcctctgacaatactggtataattgtaaataatgtcaaactccgttttctagcaagtattaagggagctgtgtctgaaatggcactgtcttgtcagtcatttctgtttaccttntcttctgccagagtgtatttgtgaagagtctcttatatgatgttttgtggaaatcagcacacancacatgacattaagcacagg

SEQ ID NO: 867 - DNA, 237 bp, Homo sapiens
ttttttttttctagtcccagcacttttatttgtagagttctcaaatcaaaagtaacaaataattatacatcaggattgttaggaataccaattattttacaactgccactacgtgtttcttcttctctgacacaagtggcacagatccaggcttgctgtgtttaatacgattcacttcctttcgtcgacgagcttctttcatgatgcgctgttcctgaatctggctatagatagatt

SEQ ID NO: 868 - DNA, 462 bp, Homo sapiens
ttttttttttttttggttttctagatccatgtttattttcagttcaaagacaaagtagaaaacttgagagtggaaaatgttaccttttagttcacactcctaatcccttagtccccataaaataaacattctaaagtgtaagcagtagaaataatggaaactccacagaaacagaaataaattagtttctttcagtcttggtggaggtccttttgccgaacaccatactccactgtgaacagaattcatcttgaacgaagaagaaatctttggcctatttcaccacgtctccagcattgcataacagacatttttcaaattcagtttcttctccaactgcagcaaaaaggcaaagagtagtctgtttcaggagtctgcatcgggtcctgtgagagccttggtccacttagaacaagcctttaacttggttctggtttcggtatccagatctatggtcataaa

SEQ ID NO: 869 - DNA, 624 bp, Homo sapiens
  misc_feature (1)...(624): n=a,t,g or c
ggacacccaaagaatgatgcagtattaaaggggtggtagaagctgctgtttatgataaaagtcatcggtcagaaaatcagcttggattggtgccaagtgtttttttattgggtaacaccctgggagttttagtagcttgaggcaaggtggaggggcaagaagtccttggggaagctgctggtctgggtgctgctggcctccaagctggcagtgggaagggctagtgagaccacacaggggtagccccagcagcagcaccctgcaagccagcctggccagctgctcagaccagcttgcagagccgcagccgctgtgggcagggggtgtggcaggagctcccagcactggagacccacggactcaacccagttacctcacatggggccttttctgagcaaggtctcgaaagcgcaggccgccctggctgagcagcaccgccctttcccagctgcactcgccctgtggacagccccgacacaccactttcctgaggctgtcgctcactcagattgtccgtttgctatgccgaatgcagccaaaattcctttttacaatttgtgatgccttaccgatttgatcttaatcctgtattaagtttctaacactgaganaaaaaaaaaaagg

SEQ ID NO: 870 - DNA, 425 bp, Homo sapiens
  misc_feature (1)...(425): n=a,t,g or c
ttttacgtgtaaatggacattttcattcaagtatattaatgtagatattttaaagtgggttataagtttaacattgtctttaaaatagaagtcacagctatcttccagcctgtcttctctaggaacgctgttgacatgccagggctccgtctacactggaagcagctatacagctgtgaccacatcgagctttancagtcacacttctggaactgtccgttcagtccatcccatttctggctaagctcctcacgtaggtgcgtaggttctggttaataaagttcactgttgtgtgaaagacatcacggagcaaggacggcgtgtgactggccaccttcttggccagcagcagggccagcaccagcatggtcttctccttctccatggtctctagggtaggnctgcagcagctgctccagggcagt

SEQ ID NO: 871 - DNA, 452 bp, Homo sapiens
  misc_feature (1)...(452): n=a,t,g or c
ttttttccttccatcatttatttaggaaaaagttttatgtattagggtaaagtggtagaagttaacctagaatctaataatctccaatcacccattcctgatctaatagtagccatgagaaaaaatctctagaaagaatcatacctctcaaaaaataaaaaataaaacaaaggctgggtgcagtggctcacacctgtaatctcagcacttccggaagttgaggtgggcagatcgcttgagcccaggcatatcgcttgcagcctgggcaacgtggcgaacgtcctctaccaaaaaatacaaaaagtagccgggcatagtgacatacacctgagcccaggaggttaagcctacattgagccgtgattgtaccagtgtactctagccagggtgacagagtaagaccctatctcaaanaaagaagtgccataaaaaagaaaaggctctagccttta

SEQ ID NO: 872 - DNA, 491 bp, Homo sapiens
  misc_feature (1)...(491): n=a,t,g or c
ccaggccctgcgaggggtatcgagaggagctcactgtgggatggggttgacctctgccgcctgcctgggtatctgggcctggccatggctgtgttcttcatgtgttgattttatttgacccctggagtggtgggtctcatctttcccatctcgcctgagagcggctgagggctgcctcactgcaaatcctccccacagcgtcagtgaaagtcgtccttgtctcagaatgaccaggggccagccagtgtctgaccaaggtcaaggggcaggtgcagaggtggcagggatggctccgaagccagaaatgccttaaactgcaacgtcccgtcccttcnccacncccatcccatccccacccccagccccagcccagtcctcctaggagcaggacccgatgaagcgggcggcggtggggctgggtgccgtgttactaactctagtatgtttctgtgtcaatcgctgtgaaataagtctgaaaactttaaaaaaaa

SEQ ID NO: 873 - DNA, 428 bp, Homo sapiens
cagacatggaaatataattttaaaaaatttctctccaacctccttcaaattcagtcaccactgttatattaccttctccaggaaccctccagtggggaaggctgcgatattagatttccttgtatgcaaagtttttgttgaaagctgtgctcagaggaggtgagaggagaggaaggagaaaactgcatcataactttacagaattgaatctagagtcttccccgaaaagcccagaaacttctctgcagtatctggcttgtccatctggtctaaggtggctgcttcttccccagccatgagtcagtttgtgcccatgaataatacacgacctgttatttccatgactgctttactgtatttttaaggtcaatatactgtacatttgataataaaataatattctcccaaaaaaaaaaaaaaaaaaaaag

SEQ ID NO: 874 - DNA, 391 bp, Homo sapiens
  misc_feature (1)...(391): n=a,t,g or c
taatcaaatacaatacagggctgacactgacacacagctatgcataaaaattatataaatctccttgctagattttccagaagaggcccagtcataaaaaataaagagaaaccaggagagtgcctaaatgactgcagtgtttcaagcgtacatnttccacactcccttgtactgaaggcagccccaggtgaaggtggtcccactagcaggaagattaggaggcagcagctatgcagaagccatgtctcctggccctgcgangctcaacggtagaccttgctgaactcctggagggcccaccgcttgttctctgttgcctgcttgagtacggtgtactctttcaccagcctgtcaaactcctccccaaggacctcataggagttcaggacct

SEQ ID NO: 875 - DNA, 418 bp, Homo sapiens
tttttacaattccataccaccaccacatctgttctgtgcttttattttacgaaaaagctaatggcaaatctacattaaactaagttgaatacaaagtcttagtgaagaaggcctggtggtctcgtttacaaaaatggccagtgtcatatttgggcttaaaatttcaagaagggcacttcaaatggctttgcatttgcatgtttcagtgctagagcgtaggaatagaccctggcgtccactgtgagatgttcttcagctaccagagcatcaagtctctgcagcaggtcattcttgggtaaagaaatgacttccacaaactctccatcccctggctttggcttcggccttgcgttttcggcatcatctccgttaatggtgactgtcacgatgtgtatagtacagtttgacaagcctgggt

SEQ ID NO: 876 - DNA, 432 bp, Homo sapiens
tttaacgatagacactaatgtttattattgagtgcataacacgccaggcattgtgcaaagtgtttcagcattgagtttaagtctcctggagcacagaccgacagtatccattctcttcccttcccttaccaagcgaacccctgaattctagctgaatatcttggctatacagtctcccctcaagctgaactgtagctgtgggaatcagttctggtccacaggaattaacggaagaagtgtatacaatttttgagctatgctctttagaagagtgtggaggggtgtctttcttcccttcctcctgtgatgtgatggctggatggagctggaatggccattttgcaccatgaggaatctgatgtcctgcgttggggagacctcaggcttcagttgcacactcaggggcacccgttgctctgccagccagatgga

SEQ ID NO: 877 - DNA, 347 bp, Homo sapiens
  misc_feature (1)...(347): n=a,t,g or c
ccagatcttgnagaaaattttgatgaggcatcaaagaatgaagctaactaaaagtttggtttttggaagctggcatggactagatttaacaaatcagctatgtggttccaaagttttacagacatggagaacatcacctgttactagttcagtaatataaatattttgtatattaataatgctgtttgttcagcatttttcggtcatttgattttgcattttgcacnttcctcccaggatatttttttggtcaaaatatgaagtattggtgcagtttgagggtgttttggtttttgattccctggtttttttgttttttgtttggggtatttttggtgtatgtatgt

SEQ ID NO: 878 - DNA, 444 bp, Homo sapiens
  misc_feature (1)...(444): n=a,t,g or c
tgaacaataatatctttaatataactgtttttgtgtgcatagaaatcatataagtaaataaaaaaaaacaacaacatgagattacataggtggttataatacaaaagtgagaaaaaagctagtgtctgagtattgcatcctggatataattccctgatatatggtaaagcataaaagagacctatttcttcaggagagtagctgacccacctcagggccatgactgctcttctctttccccacagccttagtactttttgccaaaaggcccagatttgagtaaaggggaacgccgtgagcgtaaggatccgggcataagggctgcagtctgttgagctttggcaggttggtgttcggggaagtaaatttcngaaggaatgggttcctnccctgntgggttgttggtttggttgctgattttccnggttgggtaccaaggcgcta

SEQ ID NO: 879 - DNA, 454 bp, Homo sapiens
  misc_feature (1)...(454): n=a,t,g or c
tttatccttagggggatcctttatttcattcacttcctccttacaaggtgaaatttcaatctgtacaggatgtgncngccagttcagtccacagctcagagtatcaccttgtcctcattccanggtnataagctcctgcgaggggacaggtctgcgggtcgtggattcactggactggatgggacatgatccagaactccgctccgtttggcttcccaaggatcccaccaactcattctaatcagtgatcactgaggaaatgcattgtattcctattcactatttcaaagatcaggcctacctcattggcatattaagaaagttttctcaagtatatttagtgtttatcattttactatagttcttcaaatgtctggacattcatcttttccntacctctaaattccnttccttttnacattaatcttttcntgattgncttttnaatagaaaa

SEQ ID NO: 880 - DNA, 463 bp, Homo sapiens
tttttcaagtttagaatacctggtttattgggaaaacttcataatgaaaactacaattagctttttccacaacttacaaaataataatctgatatttaaaatgaattggttttcattatgtaagtcgaaatggtaaaaaatcataatgacctatccgatgcatcatatatatgctattcagagaaactcaaatccccgaattctcctgtggcatgttttatatcagacatttaaaatctgtttaccaagaaagaccaggattttaactatatgtaggtttctgcttacagttgcaaactatcagaagcctgtctatatgatagagcccagataaacctgagatttagaaaagcaagtcatttattctcctgaggctgttttagtggcacttttgtgacaagaatgaccctcctaatgctttactacacaacttaaccagatctatcagtcatgataaattaga

SEQ ID NO: 881 - DNA, 549 bp, Homo sapiens
  misc_feature (1)...(549): n=a,t,g or c
ggccttcctcgtgtgaggggatctgccggacccctgcaaattcaatttctttcccattccgggcccttccctatcgtcgcccccttcaccttggatcatgttcaagaaatttgatgaaaaagaaaatgtgtccaactgcatccagttgaaaacttcagttattaagggtattaagaatcaattgatagagcaatttccaggtattgaaccatggcttaatcaaatcatgcctaagaaagatcctgtcaaaatagtccgatgccatgaacatatagaaatccttacagtaaatggagaattactcttttttaagacaaagagaagggcctttttatccaaccctaagattacttcacaaatatccttttatcctgccacaccagcaggttgataaaggagccatcaaatttgtactcagtggagcaaatatcatgtgtccaggcttaacttctcctggagctaagctttaccctgctgcagtagataccattgttgctatcatggcagaaggaaacagcatgctcnatgtgttggagtcatgaagatgtg

SEQ ID NO: 882 - DNA, 596 bp, Homo sapiens
  misc_feature (1)...(596): n=a,t,g or c
ncntggtgcccgggcctgcaccaatgagcgtcccggccttcatcgacatcagtgaagaagatcaggctgctgagcttcgtgcttatctgaaatctaaaggagctgagatttcagaagagaactcggaaggtggacttcatgttgatttagctcaaattattgaagcctgtgatgtgtgtctgaaggaggatgataaagatgttgaaagtgtgatgaacagtgtggtatccctactcttgatcctggaaccagacaagcaagaagctttgattgaaagcctatgtgaaaagctggtcaaatttccgcgaaggtgaacgcccgtctctgagactgcagttgttaagcaaccttttccacgggatggataagaatactcctggtaagatacacagtgtattgcagccttattaaagtggcagcatcttgtggggccatccagtacatcccaactgagctggatcaagttagaaaatggatttctgactggaatctcaccactgaaaaaaagcacacccctttaagactactttatgangcacttgtggattgtaagaagagtgatgctgcttccaaagtcatggtggaattgctccgaa

SEQ ID NO: 883 - DNA, 282 bp, Homo sapiens; identical to SEQ ID NO: 351
  misc_feature (1)...(282): n=a,t,g or c

SEQ ID NO: 884 - DNA, 282 bp, Homo sapiens; identical to SEQ ID NO: 351
  misc_feature (1)...(282): n=a,t,g or c

SEQ ID NO: 885 - DNA, 512 bp, Homo sapiens
  misc_feature (1)...(512): n=a,t,g or c
ttttctctgagcacgtgattgctaagtttaattcaactgttacaccccattctgccttgtaaaaataacaaaacgctcctatcaaaatgacattgtgatgtgagtacaggctttttgttttggtacagctctaaaaaatgttggcaccgaatgcacttaagaaaagtgttaaggcttaatacaaatacagagacgagtcatttctcaatgcagcttagagggtgagaacaggatgctaggtttttaaatcttccaaatacaggcagtccccaacgtacagacatacaggacacctcccaaatgtaaacgacagccacacagcagggcttgcatgcgcaggaactcttcttctcccagtgagcagactaagcactctgaatcccaccccactgcctcgcagagggaaaagaaggcaggacagatgctagaagagtaatgtcaggggctccatcacagctgcccaggggcttctgctgtagttcatattttcctcattcccatctctgggttcn

SEQ ID NO: 886 - DNA, 391 bp, Homo sapiens
gattgtataaataatttatttctgttcacagcatcatatatgcattataaaaggctatggaaacaaaagagaaggatgatgagacagagaattacagcagtagaaaggaaaacagaaaccagggcacacagttccaacaccagaacagagaatttgggaagataattgctctgaaacagaactggcctccctgtgtctattagaaaacatttccaaagctcacggagggaggccaacttcccctatggaaacccattcactcgccaaagggcagaaggcatcataaatcacccattgatacattggtggggggctccctgtccccctgggtgaccactccaaggtgatttgatctgtgcttcctctgttgggtcagagacgaaacgggcta

SEQ ID NO: 887 - DNA, 260 bp, Homo sapiens
cttaccttgggtgaactaaccaaataatgaccatcgatggctcaaagagtggcttgaatatatcccatgggttatctgtatggactgactaggttattgaaaggactagccacatactagcatcttagtgcctttatctgtctttatgtcttggggttggggtaggtagataccaaatgaaacactttcaggaccttcctacctcttgcagttgttctttaatctcctttactagaggagataaatatttgcatataatg

SEQ ID NO: 888 - DNA, 380 bp, Homo sapiens
gaacacttgagtgtcagaccacagactgcgttggaagaaaacgagactcagaaagaagttccacaggaccagcatttggaggcacctgcagaccagtcgaaaggtctcttgcctccctgaaggacctgtatactgtgtatgctggcattcacactctactcactggctgaatgttgagctatttttaaacagttgaactgtgtaaatgtttcttgatctctaaggtattatgtttgccttctcttagttatttctggggttgtcacaaagctcagtatcatggtttgacagaagcagttatgtgaacttttatgttaggacattactaaataaagaattccctagctgcttataaagtaaatttactttgaattgtaaat

SEQ ID NO: 889 - DNA, 423 bp, Homo sapiens
ttttcattttccagttaagtcctatgtcttttgtgaaattccaatacttaaactgcaagtctgcaatcgtctctgaagtcagtgaaattaagaaaaaagtcctaattctcttgaaggtcattttttcctcttaggatatgcagatgcaaccgttgctgcagtctgtgtagaactgccttttatttcccacgaccttgacgttcctttttaacactttcttcttcctcttggcgtttctcatagtgtgagaagtcatcaaaaatggaagtggtgtgcttgtagctggctataattttcaacacctgcttagccttttccagaggcacttcctgagtgtccctagagttggtcactggtttattctcgttgttctctaggcgaatgtgtcgcagttggctattgggaacgtccttcacaaaaatc

SEQ ID NO: 890 - DNA, 247 bp, Homo sapiens
tttttttttttttttaagaagcaacatgtgtattattaaattatttgtcagaatttccagaatcagagtctctactgggcaagtagaaaaatagaaaagtttactactttgaaaaggaaactatgacaaacaagtatatattcaggaaagggactcctagaacttgagcaacaaaaaagagttcaacctcggcacagtggagtctgcagtgtctccgcaacaacagaaatgaacttgtgttcctcac

SEQ ID NO: 891 - DNA, 460 bp, Homo sapiens
  misc_feature (1)...(460): n=a,t,g or c
cgacaagacggccagcgtcttcttgctggagaaggaccggttggncaaagaaaacaattatcggggacatggggatagtgtggaccagctttgttggcatccaagtaatcctgacctatttgttacggcgtctggagataaaaccattcgcatctgggatgtgaggactacaaaatgcattgccactgtgaacactaaaggggagaacattaatatctgctggagtcctgatgggcagaccattgctgtaggcaacaaggatgatgtggtgacctttattgatgccaagacacaccgttccaaagcagaagagcagttcaagttccgaggtcaacgaaatctccttggaaccatgaccataatatgttcctcctgaccaaatggcaatggttgtatcacatcctcagctaccagaactgaagcctgtgcagtccatcaacgcccatccttccaactgcan

SEQ ID NO: 892 - DNA, 414 bp, Homo sapiens
ttaccaccaaaatggttttatttttgtcattgacaacaagcacaacactgcaattgtatcattattttgtttagtttcttaaatattacttaagtatgcattaaaaatatgtttacattttaaaaatgtgacactttaaagaagtcctctgtaaacacgatcccttctcaatatattttcctgctttgtttcatacataaataacttaatctacaaagtcataaataataccatcaactcttatggcctggaagtatatacaaattttggagtctgacaaaagtgttctttatgattttataaataacacatagtatttgtagtgttgattataaatcaaatgactttttacaaattcctactgtctcctcaacctgttctaccagtaacagatcttccagtttacttggttgg

SEQ ID NO: 893 - DNA, 401 bp, Homo sapiens
gattaagaaaagctaaatttatattaaattatcataaagtcctaaaatactgaacatagtggttaaataactccagaaagtccaatctctccagtgagtaacgttaaaaccattacacatgagcatgggagaatcgcttccattagtttaggacagagagattttgctttttacagagtaaatcagtgctcaaatagatacttcctcaaatatgtcctttctacattctgaacagcccaagtgcaataagatccttccccctttccaatcaagaaaatgccacttttctacttgctcttcctccccagacatgagtctaaggacccaaagtgctcactcctttactgcttgttaagtgtaatgtggggaggctcagaactggggctgacgctactgagagc

SEQ ID NO: 894 - DNA, 243 bp, Homo sapiens
tttttttataaaaatgtgttttattgttttaaaacaagtctataaaagtagaaatcacatacaaaaatacagattactctgacatgttggcaaaatagcttatggctggacttgagtttggaagttctgtatgtttgagggcatccgatgtcagagtccaaccggatcctaaccccagctcttgtcactaatctgtaaacaataatttcaagtagtatttagcactttttaactattaagaaa

SEQ ID NO: 895 - DNA, 230 bp, Homo sapiens
ccagagtgcaagtcatgatttgcgggagggctcttgaaccacttctggctgcaccacaattctgtacttgagtatcacagtcattgtttttgagacaaacatttttataattctaatttgggttaataaagattttaaatatttcttggtttacttttgtaattatatacacaacaaatgtattaataactaccttgttaaacaccttttaatagcacaagggttttata

SEQ ID NO: 896 - DNA, 259 bp, Homo sapiens
gatcatacacaagccggtgatactttattatataagagagttgtcaaaaggacagtttcatttctgtttcagaatccccacattccagtgatccatctgttgacacaattaacataaactatttgctgatatttactgagtgcttgcaatgtatcagagtcattaaataagatgcaacttctactgtgaaaactggaatcttcattaggacacagacttagaaaaggcccagtttcaaggattctgacttgcacagact

SEQ ID NO: 897 - DNA, 308 bp, Homo sapiens
aatttccagagattatttctgtactgagaatcctggaactactatgctaggaaatttaaagctgcatggtctgtcttgttttcatttaattattgtgaatacctagaatctttcttggtcctgatttctcttgcttaatccagtctttatctctaactgcccctatttgatcaccatgtactaggagctctgatagccagctcagctcctaatccttgaggcaccattctttttctatttgaacttcagttctgtcctcgattcccgactagatatttctggccctctggtctaagaattctctggct

SEQ ID NO: 898 - DNA, 466 bp, Homo sapiens
gcgactgtggtcgtttttataccttcccgcgcggacgccggcgctgccaacggaagggcggagacggagtttcgtcatgttggccaggcccatttgagatctttgaagatatcctcaacgtgaggctcttctgccatgaaggtgaagattaagtgctggaacggcgtggccacttggctcttggtggccaacgatgagaactgtggcatctgcaggatggcatttaacggatgctgccctgactgcaaggtgcccggcgacgactgcccgctggtgtggggccagtgctcccactgcttccacatgcattgcatcctcaagtggctgcacgcacagcaggtgcagcagcacttccccatgtgccgccaggaatggaagttcaaggagtgaggcccgacctggctctcgctggaggggcatcctgagactccttcctcatgctggcgccgatggctgctggggacag

SEQ ID NO: 899 - DNA, 364 bp, Homo sapiens
ttttttttttttttttttttttttttttttttttgctgccacacgactttatttgtgaagcccccgggcacagccacgacacacacagagcacaaaggggaaagcatggggcagtcacgggtgctcagggaggtcatacagcatctgcccagtccagaccctaccgctcccctgccccaggaggtcctttaagagcagcgtccagatgcagctcggacattggggaccctgcctctccctccccagactggagaacagctttgggttgtcaacactccccctccagccaggccagtcacagacgacatctcagcagccaggagaaggcccactaggtccggggccagcgcagtcccagcagctc

SEQ ID NO: 900 - DNA, 376 bp, Homo sapiens
tttttttttttttttttttttttttttaacagatactattttattatttacaaaatacatggtgatcataagagaacattttacaaattacaaatgggaaaagtacagggaaaagtagagacaaatgggttaaataacaaggtaaccatttgtaatgagtctgtttagaataaaatagttcttcacaaaagttagacaaggccatgagtaagtatatcactgtataaaaaatatcagtgacgtcaaaatatacctgtaccaaaaagtagaacagcaatggtagtgcatctaaatgtgtcctaaattaaattacagcacatacagtttcagtgttccacaatacaaccattgctctgaggcagcaatctgtgagact

SEQ ID NO: 901 - DNA, 397 bp, Homo sapiens
ttttttttttttttactgatatctctttaatactttcatcattcaagtttgttcagaacattacaagaggcatgaaagaaaaaataattccatttttaaaactctgtccaaagtataacatatgaaaccatgccattatctcttaggaaacaaaagcattcaaaattaatttggtattaaagttcaagattcagactaacctcaaagtacggcatgtgcagtgtttaagtgcaagaagtattttcattccaattattttacagagatgctggagtgacgtgtgcaatttgaaatattcaaatcctttaaggtttctgaactaagtgtttaaatgaaaactgaaatgctgcatagtttcagtggctttcaatttcctgtttgatctcagaaatatatg

SEQ ID NO: 902 - DNA, 366 bp, Homo sapiens
ttttttcataatgatttatttagataacaaacattaatgtgaaacatacaggctattggcaaccactattctaaaattatgtaagtacaaataaacatactgaaatgtgtgcaattctaagtttttaaaccagaagatttctacactaacacacatttatattaatgacacataaaaaaaataaaaactttattacaaaaataagttacactcgcctccagcttacagtataaaacaattttatttgcaggaatgcaaaatgattgtttgccatgagcattttgaacatatgacatgtccgattttcttgttaaatttgcatttactggggaactggtgtgtataaaaccttaattaagtataagc

SEQ ID NO: 903 - DNA, 373 bp, Homo sapiens
gtcgactcctgtgaggtatggtgctgggtgcagatgcagtgtggctctggatagcaccttatggacagttgtgtccccaaggatggatgagaatagctactgaagtcctaaagagcaagcctaacttaagccatttgcacaaaggcattagacaaaaagctggaagttgaaatggtggagtccacttgcctggaccagcttaatggttcttctcctggtaacggttttatccatggatgactttcttgggtaaggcaataaggcagttcctgtcataccttttaaaggtatggagagtcggctttactacactgtgtggagcaagttttaaagaagcaaaggcttagaattcatgattgaggaatgcaggcag

SEQ ID NO: 904 - DNA, 146 bp, Homo sapiens
tttttttttttttttttgtatttcaaccaggtattttattggtctggcaactgcaaaatatacaaatttctgaaaggcatctcctgtttgaaagctagcatagctttatatcccaggtcattaattcagacaaatacacagaacac

SEQ ID NO: 905 - DNA, 504 bp, Homo sapiens
ttgaattagaaaatccattttattgcttgggtttaaaatagttgtgggatacaagtatttacaatgctattggagtcaattattgacaacactttgcaacagtaataccatttctagcttttcaattggcaatacttagaaccttactgtagtgacctgattttaaataccatattatatttactaagttaagagctagtttttactctcttccataatttcattacatgaatgtaagatgatggctcaaaaatgacgacttatagtttgaatttatgtgtatgcaatatacatatgagaaccaaattcaacaagtgacatgaatgttactacatgaacattgaattgtattgcccttgtcagttatttcctctgttcaataaatactgaaggtcacaaacacctttttacttttcaagagtttgccttctcttctcgattttagtaattaatttggatatttttcctcccatgcctcttcatctgatttagtggggatgtttc

SEQ ID NO: 906 - DNA, 499 bp, Homo sapiens
ggaaggagcccggccgccgcccgccggcatgagctacgaccgcgccatcaccgtcttctcgcccgacggccacctcttccaagtggagtacgcgcaggaggccgtcaagaagggctcgaccgcggttggtgttcgaggaagagacattgttgttcttggtgtggagaagaagtcagtggccaaactgcaggatgaaagaacagtgcggaagatctgtgctttggatgacaacgtctgcatggcctttgcaggcctcaccgccgatgcaaggatagtcatcaacagggcccgggtggagtgccagagccaccggtgactgtggaggacccggtcactgtggagtacatcacccgctacatcgccagtctgaagcagcgttatacgcagagcaatgggcgcaggccgtttggcatctctgccctcatcgtgggtttcgactttgatggcactcctaggctctatcagactgacccctcgggcacataccatgcctggaagg

SEQ ID NO: 907 - DNA, 551 bp, Homo sapiens
  misc_feature (1)...(551): n=a,t,g or c
ttagagtcttggttgccaaacagatttgcagatcaaggagaacccaggagtttcaaagaagcgctagtaaggtctctgagatccttgcactagctacatcctcagggtaggaggaagatggcttccagaagcatgcggctgctcctattgctgagctgcctggccaaaacaggagtcctgggtgatatcatcatgagacccagctgtgctcctggatggttttaccacaagtccaattgctatggttacttcaggaagctgaggaactggtctgatgccgagctcgagtgtcagtcttacggaaacggagcccacctggcatctatcctgagtttaaaggaagccagcaccatagcagagtacataagtggctatcagagaagccagccgatatggattggcctgcacgacccacagaagaggcagcagtggcagtggattgatggggccatgtatctgtacagatcctggtctngcaagtccatgggtgggaacaagcactgtgctgagatgagctccaataacaactttttaacttggagcagcaacga

SEQ ID NO: 908 - DNA, 344 bp, Homo sapiens
  misc_feature (1)...(344): n=a,t,g or c
ctgtccagaggctttaaaactggtgcaattacagcaaaaagggattctntagctttaacttgtaaaccacatcttttttgcactttttttataagcaaaaacgtgccgtttaaaccactggttctatctaaatgccgatttgagttcgcgacactatgtactgcgtttttcattcttgtatttgactatttaatcctttctacttgtcgctaaatataatngttttagtcttatggcatgatgatagcatatgtgttcaggtttatagctgttgtgtttaaaaattgaaaaaagtgggaaaacatctttgtaccatttaaagtctgtattataataaggcaaaa

SEQ ID NO: 909 - DNA, 454 bp, Homo sapiens
tttttttttgtagtaaaagaaggattttaggtttctttggtgaaacaaaagcagatataaaaagttacaaagattttagattttcattcacaaaaaaagtcattcacattttacactatacacgttatgatataaatacaggaaagtattatgtgcattgtaaagagaaaggaaaaatagaaacctactagatcaacacagtgttgttctgtgctctaaaatacctaaaggtggattacatttaatgcaacaaccaagggaacctgcttaaacatactgtgtattattgtagctagagtcattccttctaagccaaaggaggttttataaaaaaagaatcaatattgggccaatccctttgtgccctttttctctttttctatgtgcattttattttttgtctactcttcttcaagttgctctaaactgaaattagggaaggagtcttactttc

SEQ ID NO: 910 - DNA, 476 bp, Homo sapiens
tttttttttttttttcaaattttcagtagttttattgaaaaatgcctcttttgtttcagaaataaataatataaggcagtgaaattcacaatctgcagttaaaatataaaagcagcaattctatgttcatagtcttgcaaatgttttccaactacttttgataactaagaaatattatattctgaaaaaagttcatactaaatatacaacacaaacatgcaattccctctctgcagaataatctgcaatttggtataaatgttagtgtgtctaaaacaaggaggtttaaggcaatatggaactgtatcccgttgatgcactaacttcatctacatggcttaaggtttgtggttgttaaagagatgtatacgagcattctatgccccggcgtataacagagatagaagaggaagataagtaattgcaatggagttgacgtttccctcctttttggttttaggaggggaattatttga

SEQ ID NO: 911 - DNA, 498 bp, Homo sapiens
tttttttttttttgaacaggggaagtttaatataaagatgaactctactcggagcatagagtttaaaaagagttctacacaacaccctagggatgaggaagaatgcctcagggaagaaagcacagaaaaggaggtgccctcccgaggctgggactgagacctcctcgctggagaaggtgtgggaggcccctgagggtgaagttccccgggttgctcgagccagagtctgcacagtcacagggcaagcagaaaattctttcgagagggtgggcgctcacagggaatcgggaagcagagcccacctgcctacacctgaaaggccacagccagtgctgggacctctctgaggtctgcagactccaggcagacactcctggcagctgtgcagcaggagcaggaaggaaacgacatgaaagcccctttctccccagtgtcccagttcaacaccgtgcacgctaccaaggagaaacggcgcacgggccccacccacgactgcag

SEQ ID NO: 912 - DNA, 411 bp, Homo sapiens
tttatgtaatcaatcattttattattttcatcaacaaccaacacagcaacacaaattgacagccagtcctcaagggaaccttttttgaagtgaagagcaaggccctgaatgagctacctacatggaacatagtatttgcaatatgcaaatggagacctaaaggctcatgacgggaacagaaggtggctgtatacagaggaacagacacgaagtggagttatgggaagttcaatcaacaattggcaacaagctaggtcagtagtttacgaaagtggtcatctatacagtgcctgagtttgggttctgggcctggatcatgtaagaaaggcagcaaagtctgggtgccatgaatcacacctgcaatcccagcactttggaaatctgtggtgagaggatctcttaaagctatgg

SEQ ID NO: 913 - DNA, 269 bp, Homo sapiens
cccagggcagtggtgggtgctttatttccatgctgggtgcctgggaagtatgtagacggggtacgtgccaagcatcctcgtgcaaccggagagcccggggaggggctctgcggccgtcgcactcatttacccggggacaggagaggctcttctcgtgtagtggttgtgcagaccttatgcatcacgggcatgagaagacgttcccctgctgccacctgctcttgtccacggtgagcttgctatagaggaagaaggagccgtcggagtcc

SEQ ID NO: 914 - DNA, 318 bp, Homo sapiens
tttttttttttttttttttttttttcaacttaattttacaagtttattatagctcatacctgggaccgattaaggtgtcaacattttaaaattactcaagatattaaccagaaaagatgattatggcctttaaaactattggacaaactgatgctatttaacattgttcacagccatttaatttgaataacaaattttagattctaagtaggccataacttctttgcaaaacaattgatttataaaggtacagtttcagaaggtaacagcatgagactagtcttcctataggcacattttagtagactgctcttctca

SEQ ID NO: 915 - DNA, 455 bp, Homo sapiens
tttttactgtatcttatttgatgatatttattttctctgccaagctgtatagtaaaaggaaaataagtcacatctggtcattggcatttgtatcgtcattctgtaaagacaaaagagtacctatataagaagctccacgtagtgcaaatcgacatctggtaggctgctcgcccccaggcagcagctagagtctgtaattctctgcgtcatcctcttctttttcttcatttttgctttttcttcgcttgagttcttctctgaaattatatgcaaagagttgtgggtcttcatcacacatttttctgtatacatcacagaggctcttaaagtgtgagatggagagctggcggggccgaagagtagggtctatgtctgccaactctaacagcctgcccgtgctttccaagcgctgcgcttcagggaataacattctgagccctcgatggcagtatttc

SEQ ID NO: 916 - DNA, 489 bp, Homo sapiens
tttcattaaagaatttaatagggagttgattatgttgtagaatcatatcgtcctattctgtgacacattagaaacataaactttagggctttttcatctccacagcatagaggtctgatcgcttctgtctaaaaacggggatttgctggcgtatttcagccagcttcttcaggtctatgtctgaatacacgattgcttcttctgtgccagctttggctagaacctccccccaagggttcaccacggtgctgtgtccccaggcaacataggaggctttgtcatcccgggcaggagaggctgtggcacatacacctgattatcaacagcccggcttcgctgaagtaactcccaatgggctggtccagtggtcagattaaaagctcctggatataccaacagctggcagcctctctgtgcgtagatttgtgcaagctctgcaaaccgcatgtcgtagcagatgcccagacccactctgcagtaagctgtttc

SEQ ID NO: 917 - DNA, 340 bp, Homo sapiens
tttttttttagggttcagttccagctgattttatttccttctcaaaaaaagttatttacagaaggtatatatcaacaatctgacaggcagtgaacttgacatgattagctggcatgattttttcttttttttcccccaaacattgtttttgtggccttgaattttaagacaaatattctacacggcatattgcacaggatggatggcaaaaaaaagtttaaaaacaaaaacccttaacggaactgccttaaaaaggcagacgtcctagtgcctgtcatgttatattaaacatacatacacacaatctttttgcttattataatacagacttaaatgtaca

SEQ ID NO: 918 - DNA, 418 bp, Homo sapiens; identical to SEQ ID NO: 381

SEQ ID NO: 919 - DNA, 487 bp, Homo sapiens
agagaatgtctttgtgtgtccgaagttgagatggcctgccctactgccaaagaggtgacaggaaggctgggagcagctttgttaaattgtgttcagttctgttacacagtgcattgccctttgttgggggtatgcatgtatgaacacacatgcttgtcggaacgctttctcggcgtttgtcccttggctctcatctcccccattcctgtgcctactttgcctgagttcttctacccccgcagttgccagccacattgggagtctgtttgttccagtgggttgagctgtctttgtcgtggagatctggaactttgcacatgtcactactggggaggtgttcctgctctagcttccacgatgaggcgccctctttacctatcctctcaatcactactcttcttgaagcactattatttattcttccgctgtctgcctgcagcagtactactgtcaacatagtgtaaatggttctcagaagcttaccagt

SEQ ID NO: 920 - DNA, 439 bp, Homo sapiens
gtttactatataatgggaagtgaaaagccttcctctaaaattaaagtaggtttaggaaaacagaccctcaaattctgacattcattttcctaagcaactggatcaatttgctgacttgggcataatctaatctaagcatatctgaatacagtattcagagatagatacagtagagattccccagactttttcgctctttgtaaaacctgtttgtttaggttttgcgaggtaaactcaacagaggttgggagtggaagagggtgggaagcttatatgcaaattaacagacgagaaatgctccagaaggtttattattttaaagcacattaaaaacaaaaaactatttttaaaatcctgctagattttataatggatttgtgaataaaaaatacccagggttctcagaatggaataaatatcccttttaatagttatatat

SEQ ID NO: 921 - DNA, 383 bp, Homo sapiens
ttttgttttttttaacttttatcaatccttcattgatttgaagtaaaagtgctaaagcaatggttgtgggtggcaacccattagcagatcacaaaatcactgtagtgggtaactaaacaagaggaaacacaagacggcatcctgtgtaactggggttaagcattactctctgaaactcatggcatcagtttcctcttaggctcttccaacagagtatactcatgttcatttcagtttacaatccttgcagtcccatcgatttgtgagattatacccaggtcatccacagtggaggtctgaaaatgttcttagttgtactctaatttcactaactgccaaaaggttttccagaataatctcagttgcttcattcctttaaagat

SEQ ID NO: 922 - DNA, 411 bp, Homo sapiens
tttttttttattctctaaaatttatttacagttaataagttaaaaagcaaagtacaagcagattataaatctcaaccataagcacatcaaactgtccagggaaacactttgattccattacaaacaattgttttctaatgcgcttaagacataacactctatcaaaaaatattttaaacacaccaataaatattaggcatgtatgtccattaaaaaccattaaagagtcctgtggcaatccttaaaacaatgaaaaacttttgagttcaaaattgctcagatattttgtattcaaatatttttaaaatttacttaagagttttctaaaaaatagtactatcatttgcacacagcagatcaataggtgtcagtcaccagcttaagttacacttgtcaatattcaaacttgaa

SEQ ID NO: 923 - DNA, 362 bp, Homo sapiens
tttttttttacaagatgttgcatcactttattttaattgcatgatttatcagaacaactattaacatacgaagtaccattcagttcagctgcaggtataggcagtgacaagtatctaattcttagaagaatcacttactcccacaatctgtccagacacattagtctaaggacaagtttataaatagcaaacgtgattttcacattgcagtgttctcaagaatgtatatacaagtgtgtagtcctgttgatgggatgtttccccgagttctttctattgatgcgttcatgctcttgaccctggtagagacagttctttctttccacagagcagattttcttttgtcatccaccatttacaat

SEQ ID NO: 924 - DNA, 336 bp, Homo sapiens
gaagtagttttttcatgtttaatttgtatttgtaaaaaaacaaaaagcaaaaaaattcccaaaacccagataacaaccagagcaaaactgttgtgccttctatttatctttgatttcagtcttggcaattgtttaaaaaaaaaatctagatttgttttattaggttcagagtatgtggggaattatagaatccctctttcatcactttgtgtatgtcttttgttaacatatttgttatgccttattctaaaattgagtctcaaactggaatgcctttgaagacagatgcttctatagaggttctttgacctaaatagttcagcatttgtattttta

SEQ ID NO: 925 - DNA, 427 bp, Homo sapiens
ttttttttttttttttttttttttttttttttttatgactggcttccacggctggtgagaggggcaaagcacggcataaagaaatggagacgtgggaaggggaccatgttgactgccaacttgcggaggtcagcattgagctggccagggaaacggaggcaggtggtgacacacttcatggtggctgagacaaggtggttcagatccccgtaggttggtgtggtcagctggaaccgctgcaggcagtcacagctctctgcctccttccgtaccacatccaggacagaatcaaccagctcggcgccctctgtgtagtggcctttgccaagttgttacctgccccagactgaccaaatacaaagttgtctggtctaaagatctggccaaaaggacctgagcgaacagagtccatggtcccaggttctag

SEQ ID NO: 926 - DNA, 187 bp, Homo sapiens
ctgagtggtactttctcttcctggtaatccctggcccagccttatgcagaatagaggtatttttaggctatttttgtaatatggcttctggtcaaaatccctgtgtagctgaattcccaagccctgcattgtacagccccccactcccctcaccacctaataaaggaatagttaacactcaaaaaaa

SEQ ID NO: 927 - DNA, 366 bp, Homo sapiens; identical to SEQ ID NO: 386

SEQ ID NO: 928 - DNA, 434 bp, Homo sapiens
tttgttaaagaatgctttattaatacaaatacacacaaactctgaagcactaagaaatttaaatatctatgtcacagcaaacaggtggcaattcaacatccagggtcgacagaatgcttgaaggagactgcaacagattggattcccatggtggagagggcatcttcacaggtgaaggggggcccagctgaaacagcttttcaagctctctctcctcgtcaaggatcatgagaggcactccactcaaggggaggtgcgcaatctggtgctcttcaggcaggtcaaaactctcaaagtctagaggattgaagggaaagaatttttctatttctggataggcatcatctgaggcaggaacagagctttttgctttaacagtcttctcagtcatctttttggcagaaaagcttggctgtttttgtttgaggggtccc

SEQ ID NO: 929 - DNA, 323 bp, Homo sapiens
tttctttagttttgcttttaatgaaggacaagggattaagacacacagagactggccagacaaatgggaaaccgaccagaccagcccatgaccaaaatatcacaggcagaccacccgcaaatgcagaggcctcagagtccacagtgggcagttggaaccaggccccagggaatctttcagctgcattccggctgtgatcggcgggcaacaggtagaggtgctggagggggatgagtcgtgattttcagtgtctgtcatattcgatcaagtgtgtcatagagcttcctgtttcatctcccagttattcagggagaggctggtgg

SEQ ID NO: 930 - DNA, 337 bp, Homo sapiens
ttttaaaaatgtaatactgtttatttaacttcaaaaacatttcagcattctaaacatacaaaaaaataacagaacgttgcgaatcgtgtttaagtacaggaggttcttgaactttcattgatgcagtgactctttgctttgctgacaatgaagagttctatagtttgtttaaaaacaaacagtttaaaaactaccgcacttaaaaaaaaaaaatattctcatgccagctgacccccctttgtccacagctaagatggcagcagaatgctatgtcactatatacagaaacaagacaacctgaagctaaatggatgccccctgcagagtcaacaggtcc

SEQ ID NO: 931 - DNA, 445 bp, Homo sapiens
ttttttttttttaaggctttttaaaaatttacttattacttgttcttagcaaattaagacaattacaataaaacatcagctaactgggttcttgtgagaaaactgaggtcagcttggaaaggagttccccgagtggagttcccagcggcccgcggctgacggccagatctgtcctgaggggtcgtgggagcccagcgcctgccttgagggaaatgaacactgaaaacaggatttgggagcagtattggattgacagcagagaagggactgtttgtaagggcagtttctcactgaagctgctaccattttcctttgtaaagaagtcatccacctcctcccagcggtgcccattttcaagacgctgccagagcctcttaaaacagcttcttgaaagggtttttccacaacgggttctggaatgttctgcttcagctctggaggatgc

SEQ ID NO: 932 - DNA, 510 bp, Homo sapiens
ctgggttgccgcgggaccctgtcagatgagcatgctggagtgatatctgttctagcccagcaagcagctaagctaacctctgaccccactgatattcctgtggtgtgtctagaatcagataatgggaacattatgatccagaaacacgatggcatcacggtggcagtgcacaaaatggcctcttgatgctcatatctgttcttcagcagcctgtcataggaactggatcctacctatgttaattaccttatagaactactaaagttccagtagttaggccattcatttaatgtgcattaggcacttttctgtttatttaagagtcaattgctttctaatgctctatggaccgactatcaagatattagtaagaaaggatcatgttttgaagcagcaggtccaggtcactttgtatatagaattttgctgtattcaataaatctgtttggaggaaaatggatcttttctagattctttaaacttaaccaaatgttccttttgttcagttat

SEQ ID NO: 933 - DNA, 289 bp, Homo sapiens
tttttttttttttttttttttttttttttttttacagaagtatttattttaaaagtagacttaaaaaagaaaagtaatttagattaaaagatccaaggtgtattgtttcatgtaggtgttactgctacctatactttcaccccatttattaagcccaaaacacttcaagcaacttcaggttcataaattaataaggaggtacagaagcccaaccaggatgggaaagaatgtgtttcaggttagaaggggacagcatggctccccaatgatgtcttgtatggaacatttg

SEQ ID NO: 934 - DNA, 345 bp, Homo sapiens
tagtagtgtaaatagtttattatttgctcatatgccatgaaaagaccagaaaagtaacatgaattgcttttataaaacattctaatattgctaagaagcaggcccattaatagacaaacagaaaagaacatgccaacgttgtctatttgtagattaataaataggcaattattttaatatacatatatgtcagcattgaactttggaaaacagctgctttgtagtggaagtccaacttggtcaaattgctatttttaatcgaagtgaatgttgagtccacagaaagacaaaatcgtggcatgttctttttaaagtaaagtacacatttatgggaatgtgcccgca

SEQ ID NO: 935 - DNA, 438 bp, Homo sapiens
tttttttttcagaagaatgtagtttgatatttatttagtataaaacgtttgtgcacagtgttaacaaatacaatttttacaaatctgttttgaaaatgtggtggctgtttatttgggtttcatactcttaattacttcatccatcagttttttaacttctttgtgtcttgtaactgctcggctcatacagtcctgaagtttagctccagttagcccacttccacctggtttgtgaagacaacagagtttgccttcctcatccattactattgttaaggttcctgttgccagatgttcctcctctccagtagggtcaactataagcaaagtgtcatcaaacacagcaaaggaagttgcaactggatgagttctaatattcaaataacttttcttctttaaattaacttctgctaaagcagtttcttcatttatagtaac

SEQ ID NO: 936 - DNA, 446 bp, Homo sapiens
cttcatgctgccccagctctttgtgaactacaagttgaagtcagtggcacatctgccctggaaggccttcacctacaaggctttcaacaccttcattgatgacgtctttgccttcatcatcaccatgcccacgtctcaccggctggcctgcttccgggacgacgtggtgtttctggtctacctgtaccagcggtggctttatcctgtggataaacgcagagtgaacgagtttggggagtcctacgaggagaaggccacgcgggcgccccacacggactgaaggccgcccggctgccgcagccaagtgcaacttgaattgtcaatgagtatttttggaagcatttggaggaattcctagacattgcgttttctgtgttgccaaaatcccttcggacatttctcagacatctcccaagttcccatcacgtcagatttggagctggtag

SEQ ID NO: 937 - DNA, 427 bp, Homo sapiens
tttgaagagaaaatctctaataatttattgaccttcagtttcacattgtgaaaaaaaaaaaaataacagttttacaaaacctcaaaatgtagtcatagcaaacaagtacatatgaacatgaacattttccttcaacttatacagagttttgtacgtgaaccacatggtcaatagccaagagagggacattatgcagctctaatcactcttattcaagacaggtgtcaagcccaaagaaaaggggctacacaattataccagaagtggagggctgccctttgttatgtgtttctacagcaaccagcccacaaaataagaagaaccttctctgtcttatgccaaggtttttgtgtgtactgtgctgtgaattgtatttgcttcaaagtgtgggacgtttcacagggtgagaatggtcaagtagtgagac

SEQ ID NO: 938 - DNA, 352 bp, Homo sapiens
ctcataaaaatattatatttttcaaaagaaatataatacattgaaaatcactgattgctgcttcttcgtctttttttccgtgaatgtgtaggtgtttgagtctcttgtatttcttcttttacacaggatatgggctgtttgaaaactatttcatcatctttatcatcatcattcagttcagccacttgagattttcgcctctccaaaaatgttggtgtacaaactggtgtggggccctggctatccacagtcttctcaggagtgtcaagagtacctgaaacttttttcttcttcttacgtaaaacctggccttttgtagacgtctgacgattagtttttgaaatactttccg

SEQ ID NO: 939 - DNA, 369 bp, Homo sapiens
ttttttttttaaagttttcagactttatttcacagcgattgacacagaaacatactagagttagtaacacggcacccagccccaccgccgcccgcttcatcgggtcctgctcctaggaggactgggctggggctgggggtggggatgggatgggggtggggaagggacgggacgttgcagtttaaggcatttctggcttcggagccatccctgccacctctgcacctgccccttgaccttggtcagacactggctggcccctggtcattctgagacaaggacgactttcactgacgctgtggggaggatttgcagtgaggcagccctcagccgctctcaggcgagatgggaaagatgagacccaccact

SEQ ID NO: 940 - DNA, 455 bp, Homo sapiens
tttttttttaccattttttttatatcctgcatttatttaagcaaaccaaatgtgtagagataggaaattaatgtgttataatgttttacaaatacagagagaaaacacagaatattaagaccctgaagagagtgcatttgagaacgcagttctatcataggagaccacttgcagggaacacattaaagccattgctgacacagccatctgtcattcctggtttgccgtcatttaagtagtttcaatagataaatcggtgatttgcttttaaacaaatattaatgttaatgattagggtagccttgaagggtttgtgagtgactgtactatacaatgtgatgctaggcttaatgtgtcatttcaatgctgttgtacattatgcaggggaaataatgtcttattacacattaactgcgacatccactaaaatgtgaactagtttgcataggttagtc

SEQ ID NO: 941 - DNA, 541 bp, Homo sapiens
tttttttttttttttttttttttttttggggcagctaaaatttttattctgttgtcaaggggcaagatgccagcttggaagtgccaaggagctaaagggcccagcactgccggccccagaactgtctgttcaggctgtgcagtaagcaccagagcctcgcctgtccacgaagggtgtaagcctgtgctccacaatgtgctcagctccagagaggcccaacaacctcaggagggcttggctgtgggtctgaatttctttcctttgtgcttgaagctgcgcagtgggttctgggactttgctctcttggccttcctacaagaggaagacagcttcttccgcttttgtgagggcgtaccaggccacggagagcaggaggaaccaggtagtcaggaacatggcccaggtggggcttcaccactgcggggtgcaaaggtaggtcatgccgcagcagctggaggtccctagggttgtcttcaaagtatgtcttaagcttctcagaatgcagaagctcttccttgatctccttcaatcttgcctcccg

SEQ ID NO: 942 - DNA, 365 bp, Homo sapiens
ttttttttttttgaaacgaatgcattttattttaggtaacaaaagtagagtcaagtattttttcaaagttcatatacaggcacagtctcagtgaactggcgtcagggcctcgtacagtctctgtgcagccagctccaccatttctcggagggattcatcgtcttcacttccctcttcacattctacagtccgtgtctccaagttaaggttggcagttttcccgtccactgtgacgctaagaatagagtcatcctttacacttacacagtcttctccaaatatgtcctggagcatgatctccaacctcttgctgtaaacgtgcatttctaattttttagaaaccttctgtactgcaccttttctta

SEQ ID NO: 943 - DNA, 332 bp, Homo sapiens
ttttgatgataaacgactttactctaaaagcggctggaactcagtgacatgagcgtgcgctgaccccacatgggccccctgtgcaagcagagctggccggcccctccttgctggcagaggcacgggaggcctgctggggatgaggccactggccagggctatgctgcaccagaccaatggcaccgccccacccctcccagcgcaggggcagcttggagcagaggcagcactggccaccgctgcgggggcaagtcagcgtcaagagagtccctgagtgagaaggcccagataagcccaggccccccaggccagcggacaggcacaggcagggc

SEQ ID NO: 944 - DNA, 438 bp, Homo sapiens
tttttttttacatttgcaaaacaacatttattcttttaaaaaatctatatacattgccatacaaagataccacattgaagcagttctcaggaaccttccagtgagccttctcttataattgcccgagcaagatttcgtgccagagaaagtctcagcatttccaccttggtgttctctatgtcatcatcctggagctgctcggtatcagattctccatgcacaggtcttcttgacgtcaagtcctccagacaccgcatcaactcataagtctgttctgctgagaaaatcacctgtttctgttccaaaaggggcaaggcatctgtcagcagagtcatccagaaagaccgaggggcaatccgagacgtcatcaaggacagaaggagagaagctgcgtcggcaaaacgcttctccccgtacatacggtggaactcgcgatac

SEQ ID NO: 945 - DNA, 454 bp, Homo sapiens
actttgtgtgttgtgtcttattaacaccaaaatgtgccacatcatggtttagaagaggtggagggtgcaggcaggaggctccgaagtcccaggcaggcgcgcagcctctggcatctccatggactccagctggagagcctgtccgctcagcaacaccccaggcagcaccaagaataacatgcccacaagaacatcatggccaagagacgcacaggcgcatcccgcttccaggcacctttcccacctggccagaagtccctgctgtcatcccgacttgcacggtggttttggtaaccagtgggctgtgcaggagtgaaagtggggtcactttccttcctttcccagctgctggagtcggaactgctgcctttgtttggcggccttgtttcttaaatcagttccctcttaggatttattacactaaaaaaaaaattagtttttgaaaagaaatagg

SEQ ID NO: 946 - DNA, 446 bp, Homo sapiens
tttttttttttttttttttttcaaaaaggcaactttttttttttcttggcatcaatgaatatgcacttcagaaatctacagagaacttttttcactttgtatttgttccacagcattctagccaggagtacaaaataggagctcttcaagcagcacatgaagatggcccaggagccttcagccatccagagcagcagagcagcacctaaatctccacacacttcccagtataaccactaagaacacactagacccttggcattaggggatttatcatttccagttctattatctgggaatgactccaagggtttgtgacaagcttttgaaacgtaagtgctaagacgagtgtggacaagtcactgagctaatgaagaatagacccactgtctgcttggctctgctattttgtacctgtcttcacatgtggggaaacttcataactg

SEQ ID NO: 947 - DNA, 392 bp, Homo sapiens
acaacagctgatttttatttttcttcttgattctcttctacagtttccaaattctctacaatgaacatgtacttctttttaatatcaaaagacaaaagaattggtacgtaaaaagaacatccttcccatcttcaaggtcaagattgaacgctgactcctgcaggaagtcttccaggattcccaggcaggaatgatggctccctgtccctgtagctccaggagttcttgcttcacgcacgcctcacataccagactgaatgttggcaggaggagtgaccaggtcggtcatctgtgtccctaccacctacaacaggccagcaatctacccgtgtgtgtttgttggacagaattaaccatgatgggcggccgagggcgctggagctatttggggg

SEQ ID NO: 948 - DNA, 372 bp, Homo sapiens; identical to SEQ ID NO: 403

SEQ ID NO: 949 - DNA, 534 bp, Homo sapiens
tgtctgaatcaaagatttttattgattctcctgccaaacacaactgatttccatctacaattactttttaaggtaagaaacagtaagtcaactgaacaaagagctgggctttgggcctggaacgtgattacacaccgactgagaaatgcaggacctcagggtggggtctagtcaggctggccgcagcagggcacgaacctgcctcagtgggccttctccaagaacgctctgcagcacctgacacactgctggtacaccgtctcaaagtcagagtcattcccataatagggatcttcacataaaaattggtttttgtgggatcaagctcccaagtagttcaattttaagcttgcaagttttaacccgcatactttttctattcaaaaccccccgattgctttcatccctacataggtatatatccaatgtgggaaaaacctccttgggtaatctgccggggaaacttggctcatgggaaatccgggcctcttcatgcagctctgcctccgtagttcaggggggttcccaaactca

SEQ ID NO: 950 - DNA, 293 bp, Homo sapiens
catgtcccctgcttgaacactgaagggcaggtggtgggccatggcatggtccccagctgaggagcaggtgtccctgagaacccaaacttcccagagagtatgtgagaaccaaccaatgaaaacagtcccatcgctcttacccggtaagtaaacagtcagaaaattagcatgaaagcagtttagcattgggaggaagctcagatctctagagctgtcttgtcgccgcccaggattgacctgtgtgtaagtcccaataaactcacctactcatcaaaaaaaaaaaaaaaaaaacc

SEQ ID NO: 951 - DNA, 254 bp, Homo sapiens
ttttttttttttttttcaaagaccacagtgctttactttttgtcttaacagaggagataacttgagggacagcccccaaggcgccaggtagccttcaggggcgggcagggttgggggaggtaggagactcggaccggcagccctggctccagcttcatcatctgtgtcttccctctctggccaggctcttcgaggggatgcaggaggctgggcacggtgagctggcagggggcttggtcttcgggtgcccagcg

SEQ ID NO: 952 - DNA, 344 bp, Homo sapiens
tttttttttttttttttttttttttggtagttcttagttttattataaccttgtattttctggcaaaaatataaatctaaatgcatgatctctgggcacacagctcaagtatcagccttgagatgacctaagcagcaaaaatttggcctatttaattaaatgcacaggaggttgcagccgcatttattagaaaaatattatcctttggaaattcctttcttgaagattggctccagggcgttgttctttctgtttttatgcaattgcacttccttggcaggcagccaggcgctccggtgctcacaggccatgggacactccagttccctgcagacccagcgggc

SEQ ID NO: 953 - DNA, 451 bp, Homo sapiens
  misc_feature (1)...(451): n=a,t,g or c
agaattaacttctacaagaaaacatacaaacaaccccatctccagacaaaggaagagcaacggaagaaacgcgagcaagaacgaaaggagaagaaagcaaaggttttgggaatgcgaaggggcctcattttggctgaagattaataattttttaacatcttgtaaatattcctgtattctcaacttttttccttttgtaaatttttttttttttgctgtcatccccactttagtcacgagatctttttctgctaactgttcatagtctgtgtagtgtccatgggttcttcatgtgctatgatctctgaaaagacgttatcaccttaaagctcaaattctttgggatggtttttacttaagtccattaacaattcaggtttctaacgagacccatcctaaaattctgtttctagatttttaatgtcaagttcccaagtntcccctgctggtt

SEQ ID NO: 954 - DNA, 534 bp, Homo sapiens
tttttttttttttttttttttacagatatagctggtttattttggaaacaagtctcatccagaaatgttatttactgcatttaaaaaccatggaaggcgatttgcatggttcctccccacgccctcactcccaccaagtacagctttaccacccaaggtcctttcaggacccaggcctggcggctgtaggagagagcagtgaatcctaagggcaagagaatggcgtccacttgccagagtttctcagagcagagccagctgctcctccagacaggccggtgaggcacttgacaccctcacaaaggggaaaccctgaaggaagtacttcagggggtgcctgcccgatgcgggaggttttgggctagccctccccagatccccggcctgaggggcctcctccagctgcagaagtcaagctgccaaactgccaaagtattcctgcagctccagcagggcccggaagcgatgggagacagcgttcttctccgccttaggcatctctgcgtacgtctgctcatatccatcaggctgaaa

SEQ ID NO: 955 - DNA, 418 bp, Homo sapiens
ttttttttttttttttttttttttttttttttgacaatgagaaaaaattttatttatgacgatcttgagcagtataaaactcagaagctccactgaggtgaaggaaacatggacatgatactaagcaaagcctagtcttttccataaaatgaataagaagtacatttggtggagtttgagaccagcctgggcaacacagtgagaccctgtctctaaaagcattaaagcattaatcctcgcatttcgatagggctatgtagcttttaagtaagcaatgttagaatgagttgtagagttttatttttgtgaatatagtgagtgacagatggcaattacatgaggatatttgaacgaaggtacataagcctaaacaatttcacctaggtaaaatattgatgtcataaccaaactatatggc

SEQ ID NO: 956 - DNA, 384 bp, Homo sapiens
atttggaccggcatgcaggcaacttcttttgttgttacatacctgtattaggaaaattacacccattttacagaaaaatcccaaaacatatactgcaataagctcaaaacaatgtgaaaaagaccagtgtgaatggcacacaaaaatcgcctctttataaattaactggaattcatgatcatgaagtaggcacagggaaatccagtcctcagggctttgctctctggaagaacacctttaagtaatttttaaaaactttagcatcaggctgctgaagcgcttgacaaaactcctgaattatttctggagctacttgcaaggagggcaggtattcttgttgaagatactgaacacattctgggccccgtttgagatgaattgttt

SEQ ID NO: 957 - DNA, 419 bp, Homo sapiens
ttcacaaaagccatctctctttatttttcattcctgccgttcaaccagtttgtgcaagctgaggatgagtgggttttggaacgggaggcagagcatctggggacagaccctcctggaaatggtctatgcacactgctgaggctggttagacttgagaagcaattgacaataaactctacagaactggaaatgttcaaaagtgtcaaggtggcttctggctgttttcctgcctccctgtgggggtcagttatacccatcagtcctgtgcaaaggtcctgggactggcccaggggcagccggattcttcgctggggacaggagctgtcctgctcacccagcagaagcatgccaatggacaggtgctcgggtgtgtgcccaggtgctgtggcccccaaactccgtggctcctcaagcatgtc

SEQ ID NO: 958 - DNA, 429 bp, Homo sapiens
ttccataataacaaaagtcagtttattaaatgctcaattctcaaaattatatatatatatttttaattatttaaaaaaacttccatgcccttccattcccctccctccaaactaggtattgtccaagttgtatcaaatgccacaaagtctaccatgcacccagaagcagagaagacaggaggtccagaggacaaggtatggtggggtcactactcgcactgcagagtccacgcgagttaactcatgctgggggcaaagaatggaaagagctaatacacagacaaagcaaaagaatgaaatgcgcagctgaccagagacgtttacaatttataccaacttacaaatatttagggtgcccaccaactccgagagaacagaccaaactaaccacatgaaggaagacctctgccggggcctcctctccctaca

SEQ ID NO: 959 - DNA, 483 bp, Homo sapiens
tttagaagtgaaagttgtttttattgtttatatattatcaagcaggcatctgatgacctgtggaattagaaataccagcagacatttccaaggggtaggtgcacaggtcaacagaactaaactacagtgatcttcccttagatccttttctactgaggtgaatagctcaaaagacaaggatgcctttagtccaggctaacccctgtagcctctacgcaattaacacagaagaaaggccttcctcccttccagcactggggctcaacagtggactgagtgtttggtagtgtacatttccaatcttaatagagcaaagccagacttctgctttgatgactgagctacagggacaggagtggtccaaggttctcaaattctgtttttgtttttttccagacttctatactattgtctgccctaggctgtagggaatgctggttagtttgctgaacagacactgtgttcagcagggtttgtggtatc

SEQ ID NO: 960 - DNA, 414 bp, Homo sapiens
ttttttttcaataggtatcttctttttttattccagataactacttccactcacaatgagatgaattgtctttttacagaatttagggattccaagttgcctggttttaatataatacatattcacaaaatttacacagctcatgcataccataacttatacagagaacagtttagcagtctgcttaaaatgttacaaaaaaaaatcataaaaagccattgttctgttacacataatctgtactgaagtcataagcatcatcctcttcaatgattttatccaagataaaagaccttgtagactgttcacctgctgtagtctcctcagacagtgcctcccctgtctcttctgcagcaaacatgcctgagctgttttcatcaacttcttcatcaacagtttcctggtcactgtctt

SEQ ID NO: 961 - DNA, 303 bp, Homo sapiens
ttttcattttgaaaaagctatttactttttttccaaatattatcccaaaaggtgttttacagataagggtcaatacgaagtcaaacattctacagaagaaaatcgtttttacagacattaagaataattttaacagaagaaaaagctcacatctatctagatgtggctatgttccatgggaaaaatttcagcatccaaagtgcaaagaaaaaatgactgtagcttttcttaccacaaaatattgacaatcttcccttatagcctactctttattgttagttgggatgccaaaggatgatatat

SEQ ID NO: 962 - DNA, 391 bp, Homo sapiens
ttttttttttttttcaaccatcaatggcattttattgtggaagtttctatgtattacataggtattaacttccttcctctcctgctcctccccacaaaatccagaaagttatttttatacataaacaactgaacatataaaaatcttggacctaatttctctaaagtcttgggttaaaagaacttgagtggcgcttctcctttctgagagtactacttctcaaggaggattcatggtctgtcctttgctcactacagatttctcctcttctctgggaaaaaatggtcaatgcttctgcttccttttaataaactaatttcttgattattatacattattattattccccacttgacaccttcttagaaacttgattgttggatgtgttttt

SEQ ID NO: 963 - DNA, 760 bp, Homo sapiens
gccaggagttgtgagtttccaagccccagctcactctgaccacttctctgcctgcccagcatcatgaagggccttgcagctgccctccttgtcctcgtctgcaccatggccctctgctcctgtgcacaagttggtaccaacaaagagctctgctgcctcgtctatacctcctggcagattccacaaaagttcatagttgactattctgaaaccagcccccagtgccccaagccaggtgtcatcctcctaaccaagagaggccggcagatctgtgctgaccccaataagaagtgggtccagaaatacatcagcgacctgaagctgaatgcctgaggggcctggaagctgcgagggcccagtgaacttggtgggcccaggagggaacaggagcctgagccagggcaatggccctgccaccctggaggccacctcttctaagagtcccatctgctatgcccagccacattaactaactttaatcttagtttatgcatcatatttcattttgaaattgatttctattgttgagctgcattatgaaattagtattttctctgacatctcatgacattgtctttatcatcctttcccctttcccttcaactcttcgtacattcaatgcatggatcaatcagtgtgattagctttctcagcagacattgtgccatatgtatcaaatgacaaatctttattgaatggttttgctcagcaccaccttttaatatattggcagtacttattatataaaaggtaaaccagc

SEQ ID NO: 964 - DNA, 1201 bp, Homo sapiens; identical to SEQ ID NO: 409

SEQ ID NO: 965 - DNA, 2922 bp, Homo sapiens
ggacaccgggccatgcacgcccccaactgaagctgcatctcaaagccgaagattccagcagcccaggggatttcaaagagctcagactcagaggaacatctgcggagagacccccgaagccctctccagggcagtcctcatccagacgctccgctagtgcagacaggagcgcgcagtggccccggctcgccgcgccatggagcggatccccagcgcgcaaccaccccccgcctgcctgcccaaagcaccgggactggagcacggagacctaccagggatgtaccctgcccacatgtaccaagtgtacaagtcaagacggggaataaagcggagcgaggacagcaaggagacctacaaattgccgcaccggctcatcgagaaaaagagacgtgaccggattaacgagtgcatcgcccagctgaaggatctcctacccgaacatctcaaacttacaactttgggtcacttggaaaaagcagtggttcttgaacttaccttgaagcatgtgaaagcactaacaaacctaattgatcagcagcagcagaaaatcattgccctgcagagtggtttacaagctggtgagctgtcagggagaaatgtcgaaacaggtcaagagatgttctgctcaggtttccagacatgtgcccgggaggtgcttcagtatctggccaagcacgagaacactcgggacctgaagtcttcgcagcttgtcacccacctccaccgggtggtctcggagctgctgcagggtggtacctccaggaagccatcagacccagctcccaaagtgatggacttcaaggaaaaacccagctctccggccaaaggttcggaaggtcctgggaaaaactgcgtgccagtcatccagcggactttcgctcactcgagtggggagcagagcggcagcgacacggacacagacagtggctatggaggagaatcggagaagggcgacttgcgcagtgagcagccgtgcttcaaaagtgaccacggacgcaggttcacgatgggagaaaggatcggcgcaattaagcaagagtccgaagaaccccccacaaaaaagaaccggatgcagctttcggatgatgaaggccatttcactagcagtgacctgatcagctccccgttcctgggcccacacccacaccagcctcctttctgcctgcccttctacctgatcccaccttcagcgactgcctacctgcccatgctggagaagtgctggtatcccacctcagtgccagtgctatacccaggcctcaacgcctctgccgcagccctctctagcttcatgaacccagacaagatctcggctcccttgctcatgccccagagactcccttctcccttgccagctcatccgtccgtcgactcttctgtcttgctccaagctctgaagccaatcccccctttaaacttagaaaccaaagactaaactctctaggggatcctgctgctttgctttccttcctcgctacttcctaaaaagcaacaaaaaagtttttgtgaatgctgcaagattgttgcattgtgtatactgagataatctgaggcatggagagcagattcagggtgtgtgtgtgtgtgtgtgtgtgtgtgtgtatgtgcgtgtgcgtgcacatgtgtgcctgcgtgttggtataggactttaaagctccttttggcatagggaagtcacgaaggattgcttgacatcaggagacttgggggggattgtagcagacgtctgggcttttccccacccagagaatagcccccttcgatacacatcagctggattttcaaaagcttcaaagtcttggtctgtgagtcactcttcagtttgggagctgggtctgtggctttgatcagaaggtactttcaaaagagggctttccagggctcagctcccaaccagctgttaggaccccacccttttgcctttattgtcgacgtgactcaccagacgtcggggagagagagcagtcagaccgagctttctgctaacatggggaggtagcaggcactggcatagcacggtagtggtttggggaggtttccgcaggtctgctccccacccctgcctcggaagaataaagagaatgtagttccctactcaggctttcgtagtgattagcttactaaggaactgaaaatgggccccttgtacaagctgagctgccccggagggagggaggagttccctgggcttctggcacctgtttctaggcctaaccattagtacttactgtgcagggaaccaaaccaaggtctgagaaatgcggacaccccgagcgagcaccccaaagtgcacaaagctgagtaaaaagctgcccccttcaaacagaactagactcagttttcaattccatcctaaaactccttttaaccaagcttagcttctcaaaggcctaaccaagccttggcaccgccagatcctttctgtaggctaattcctcttgcccaacggcatatggagtgtccttattgctaaaaaggattccgtctccttcaaagaagttttatttttggtccagagtacttgttttcccgatgtgtccagccagctccgcagcagcttttcaagatgcactatgcctgattgctgatcgtgttttaactttttcttttcctgtttttattttggtattaagtcgttgcctttatttgtaaagctgttataaatatatattatataaatatattaaaaaggaaaatgtttcagatgtttatttgtataattacttgattcacacagtgagaaaaaatgaatgtattcctgtttttgaagagaagaataatttttttttctctagggagaggtacagtgtttatattttggagccttcctgaaggtgtaaaattgtaaatatttttatctatgagtaaatgttaagtagttgttttaaaatacttaataaaataattcttttcctgtggaag

SEQ ID NO: 966 - DNA, 415 bp, Homo sapiens
  misc_feature (1)...(415): n=a,t,g or c
gatcctgatgctgccagagccattgtggatgctttaccaccaccctgtgaatctgcctgcacagtaccaacagacgtggataagtggttccatcaccagaaaaactaatgagatttctctggaatacangctgatattgctacatcgtgttcatctggatgtattagaagtaaaagtagtagcttttcaaagctttaaatttgtagaactcatctaactaaagtaaattctgctgtgactaatccaatatactcagaatgttatccatctaaagcatttttcatatctcaactaagataacttttagcacatgcttaaatatcaaagcagttgtcatttggaagtcacttgtgaatagatgtgcaagggggngcacatattggntgtatatgtttnccntatgttaggggataaa

SEQ ID NO: 967 - DNA, 271 bp, Homo sapiens
  misc_feature (1)...(271): n=a,t,g or c
gatcggtttcgccatcatgacgcagtgtctcccagtggccctgttctccctggtgggcttcacccagatgaccatntgggccaagggcaagcaccgcagctacctgaaggagttccgggactacccgcccctgcgcatgcccatnatncccttcctgctctgagcgctcacccctgctgaggctcagcccctnaacccggtggcattctgggggaggagtggggcccacagntctccagcacccggaataaagcccgnctgccccagtcgg

SEQ ID NO: 968 - DNA, 297 bp, Homo sapiens
  misc_feature (1)...(297): n=a,t,g or c
agggttcagttccagctgattttatttccttctcaaaaaaagttatttacagarggtatatatcaacaatctgacaggcagtgaacttgacatgdttagctggcatgatttnnncttttttntcccccaaamattgtttttgkggccttgaattttargrcaaatwttytacasggsatattgcacagggtgggtggcaaaaaaaagtttaaaaacaaaaacccttavsggrmcygccttaaaaaggvagacgkcctagkgccygtcatgttatattammcatacatacacacaatc

SEQ ID NO: 969 - DNA, 3213 bp, Homo sapiens
agagactcaagatgattccctttttacccatgttttctctactattgctgcttattgttaaccctataaacgccaacaatcattatgacaagatcttggctcatagtcgtatcaggggtcgggaccaaggcccaaatgtctgtgcccttcaacagattttgggcaccaaaaagaaatacttcagcacttgtaagaactggtataaaaagtccatctgtggacagaaaacgactgttttatatgaatgttgccctggttatatgagaatggaaggaatgaaaggctgcccagcagttttgcccattgaccatgtttatggcactctgggcatcgtgggagccaccacaacgcagcgctattctgacgcctcaaaactgagggaggagatcgagggaaagggatccttcacttactttgcaccgagtaatgaggcttgggacaacttggattctgatatccgtagaggtttggagagcaacgtgaatgttgaattactgaatgctttacatagtcacatgattaataagagaatgttgaccaaggacttaaaaaatggcatgattattccttcaatgtataacaatttggggcttttcattaaccattatcctaatggggttgtcactgttaattgtgctcgaatcatccatgggaaccagattgcaacaaatggtgttgtccatgtcattgaccgtgtgcttacacaaattggtacctcaattcaagacttcattgaagcagaagatgacctttcatcttttagagcagctgccatcacatcggacatattggaggcccttggaagagacggtcacttcacactctttgctcccaccaatgaggcttttgagaaacttccacgaggtgtcctagaaaggttcatgggagacaaagtggcttccgaagctcttatgaagtaccacatcttaaatactctccagtgttctgagtctattatgggaggagcagtctttgagacgctggaaggaaatacaattgagataggatgtgacggtgacagtataacagtaaatggaatcaaaatggtgaacaaaaaggatattgtgacaaataatggtgtgatccatttgattgatcaggtcctaattcctgattctgccaaacaagttattgagctggctggaaaacagcaaaccaccttcacggatcttgtggcccaattaggcttggcatctgctctgaggccagatggagaatacactttgctggcacctgtgaataatgcattttctgatgatactctcagcatggttcagcgcctccttaaattaattctgcagaatcacatattgaaagtaaaagttggccttaatgagctttacaacgggcaaatactggaaaccatcggaggcaaacagctcagagtcttcgtatatcgtacagctgtctgcattgaaaattcatgcatggagaaagggagtaagcaagggagaaacggtgcgattcacatattccgcgagatcatcaagccagcagagaaatccctccatgaaaagttaaaacaagataagcgctttagcaccttcctcagcctacttgaagctgcagacttgaaagagctcctgacacaacctggagactggacattatttgtgccaaccaatgatgcttttaagggaatgactagtgaagaaaaagaaattctgatacgggacaaaaatgctcttcaaaacatcattctttatcacctgacaccaggagttttcattggaaaaggatttgaacctggtgttactaacattttaaagaccacacaaggaagcaaaatctttctgaaagaagtaaatgatacacttctggtgaatgaattgaaatcaaaagaatctgacatcatgacaacaaatggtgtaattcatgttgtagataaactcctctatccagcagacacacctgttggaaatgatcaactgctggaaatacttaataaattaatcaaatacatccaaattaagtttgttcgtggtagcaccttcaaagaaatccccgtgactgtctatacaactaaaattataaccaaagttgtggaaccaaaaattaaagtgattgaaggcagtcttcagcctattatcaaaactgaaggacccacactaacaaaagtcaaaattgaaggtgaacctgaattcagactgattaaagaaggtgaaacaataactgaagtgatccatggagagccaattattaaaaaatacaccaaaatcattgatggagtgcctgtggaaataactgaaaaagagacacgagaagaacgaatcattacaggtcctgaaataaaatacactaggatttctactggaggtggagaaacagaagaaactctgaagaaattgttacaagaagaggtcaccaaggtcaccaaattcattgaaggtggtgatggtcatttatttgaagatgaagaaattaaaagactgcttcagggagacacacccgtgaggaagttgcaagccaacaaaaaagttcaaggttctagaagacgattaagggaaggtcgttctcagtgaaaatccaaaaaccagaaaaaaatgtttatacaaccctaagtcaataacctgaccttagaaaattgtgagagccaagttgacttcaggaactgaaacatcagcacaaagaagcaatcatcaaataattctgaacacaaatttaatatttttttttctgaatgagaaacatgagggaaattgtggagttagcctcctgtggtaaaggaattgaagaaaatataacaccttacaccctttttcatcttgacattaaaagttctggctaactttggaatccattagagaaaaatccttgtcaccagattcattacaattcaaatcgaagagttgtgaactgttatcccattgaaaagaccgagccttgtatgtatgttatggatacataaaatgcacgcaagccattatctctccatgggaagctaagttataaaaataggtgcttggtgtacaaaactttttatatcaaaaggctttgcacatttctatatgagtgggtttactggtaaattatgttattttttacaactaattttgtactctcagaatgtttgtcatatgcttcttgcaatgcatattttttaatctcaaacgtttcaataaaaccatttttcagatataaagagaattacttcaaattgagtaattcagaaaaactcaagatttaagttaaaaagtggtttggacttgggaa

SEQ ID NO: 970 - DNA, 836 bp, Homo sapiens
gtgaaacaccctcggctgggaagtcagttcgttctctcctctcctctcttcttgtttgaacatggtgcggactaaagcagacagtgttccaggcacttacagaaaagtggtggctgctcgagcccccagaaaggtgcttggttcttccacctctgccactaattcgacatcagtttcatcgaggaaagctgaaaataaatatgcaggagggaaccccgtttgcgtgcgcccaactcccaagtggcaaaaaggaattggagaattctttaggttgtcccctaaagattctgaaaaagagaatcagattcctgaagaggcaggaagcagtggcttaggaaaagcaaagagaaaagcatgtcctttgcaacctgatcacacaaatgatgaaaaagaatagaactttctcattcatctttgaataacgtctccttgtttaccctggtattctagaatgtaaatttacataaatgtgtttgttccaattagctttgttgaacaggcatttaattaaaaaatttaggtttaaatttagatgttcaaaagtagttgtgaaatttgagaatttgtaagactaattatggtaacttagcttagtattcaatataatgcattgtttggtttcttttaccaaattaagtgtctagttcttgctaaaatcaagtcattgcattgtgttctaattacaagtatgttgtatttgagatttgcttagattgttgtactgctgccatttttattggtgtttgattattggaatggtgccatattgtcactccttctacttgctttaaaaagcagagttagatttttgcacattaaaaaattcagtattaatt

SEQ ID NO: 971 - DNA, 2333 bp, Homo sapiens
gaattcgggtgggtggggacagggctggccgcggcgctggcggggttggtggggctggccaccgccgccttcgggcatgtgcagcgggcggagatgttgcctaagacctcggggacgcgggccacttcgctggggaggccggaggaggaggaggatgagctggcccaccgctgcagcagcttcatggccccgcctgtgaccgacctgggcgagctgcgaaggaggccgggcgacatgaagaccaagatggagctgctgattctggagacccaggcccaggtgtgccaggctctggcacaggtagacgggggcgccaacttttctgtggaccggtgggagaggaaggaaggaggtggcggcatcagctgtgtacttcaagatgggtgtgttttcgaaaaggctggggtgagcatttctgttgttcatggaaatctttcagaggaagctgcaaaacaaatgagaagcagaggaaaagttctgaagactaaagatggtaaattgccattttgtgctatgggcgtgagctctgttatccaccccaagaatcctcatgctcctactatccatttcaactacagatactttgaagtagaagaagctgatggcaacaagcagtggtggtttggtggtggatgtgacctcactccaacatacttgaatcaagaagacgctgtccattttcacagaactctgaaggaggcttgtgaccagcatggtccagatctctaccccaaatttaaaaaatggtgtgatgattacttctttatagcccatcgtggagagcggcggggcattggtggtatcttttttgatgatcttgactctccgtccaaggaggaggtgtttcgctttgtacagagctgtgccagggctgtagttccttcttacattccccttgtgaaaaagcactgtgatgactcattcaccccccaggagaagctgtggcagcagctcagaagaggacggtatgtagaatttaatctgctgtatgatcggggcacaaagtttggcctcttcactccaggatccagaattgaaagtatcttgatgtctttacctctaactgcccgatgggagtacatgcattcaccctcagagaattccaaagaagctgaaattctggaagttctacgccatccaagggactgggtgcgttgatgcaggcagaatggctgtgcaggggtttggagggcacacgatgtgtcgtccccatgccactggtcggcactttgccactgtgtcgagttacccgtgccttagtcttctccactctgcaccctacctcgtggccagatgataacatgttttggatgctgtccgtgatgaatggtgagatgcgagattgtcagagtcaattgattaaacctcatttataccttctagtgtcattttatatgactagtttacaaaataggacattgagtttccaagtattgagataagggaatataaatagtattatatgtatcaggaaatctctcatcttgtttttgtttcatgtattttttaaagttttcatttgtgccacaaaaatctgtcgtggaatatattttattttcattaattcagtgaagttgagacttcatagtaatttagatgcaacttgaaggtaaaaattttactttgtcaatactgaagtctctgctgtaatccttatatatctttctccagagacataatattgtcaaatagatacacatttttctaataggtatttagaagcacttgaaatattcttaatctctgcatgtgttacaattcagttatttctgtagtttgtaaactctaaagtgacattactattattttagagatgtctaagttgtaattttgatttttgtggaaccattgtttgttaatgttgggattctctgcacttttgaatgtgaaagcttatatccctgaattctgatacttaagagttttctatttcagacatctctgtgtggaagttgagactaagaataatcctagggatgtcatgaatttaggcaatgtttctcatttggaaaatgaaatgagaaataatttccttctttaaagcaagtatatatagtatgagaaacttggaggcatttcatacacacatttcttaggaaaatggacacattgaaaatgtcctcttttttatattagagattctgcagctctttgctcttaagagcaaatcacaacaggattcttaatgtatgatttctttgttcatatttatgaatgtattattttatttgcttcgtaataaagtttataaggaagagcatctcatacatatcattatcgtggaacacgttgaacgtttgtgattctgtgtggcctttttggggctggaaaaa

SEQ ID NO: 972 - DNA, 328 bp, Homo sapiens
  misc_feature (1)...(328): n=a,t,g or c
cagctccgccatggctcctaaaggcagctccaaacagcagtctgaggaggacctgctcctgcagnatttcagccgcaatctctcggccaagtcctccgcgctcttcttcggaaacgcgttcatcgtgtctgccatccccatctggttatactggcgaatatggcatatggatcttattcagtctgctgttttgtatagtgtgatgaccctagtaagcacatatttggtagcctttgcatacaagaatgtgaaatttgttctcaagcacaaagtagcacagaagagggaggatgctgtttccaaagaagtgactcgaaaactttctgaa

SEQ ID NO: 973 - DNA, 350 bp, Homo sapiens
  misc_feature (1)...(350): n=a,t,g or c
gctcgtgggttggcagtatgagagttgtaatggcccgactgttgagtgagggggagcaggggatcccaacggcttgcgctgcctttgcgcanagccggcgggcggccacgtcgcggcctggctggggtaggagagggcggtccccagtgcagttgggtgaactaccgttgcacactggagtttctggtgtctttgcttggaactgacctagctcgtggcagggggaactcggctagcggccccacagcccctgctgactcaaaacaactgagttgtaagacgttcatcgccgtgttatccttgagtaaagaagcgggcttttgccatgttgtccaggctggtctctactt

SEQ ID NO: 974 - DNA, 595 bp, Homo sapiens
gggcaaggctgggccgggaagggcgtgggttgaggagaggctccagacccgcacgccgcgcgcacagagctctcagcgccgctcccagccacagcctcccgcgcctcgctcagctccaacatggcaaaaatctccagccctacagagactgagcggtgcatcgagtccctgattgctgtcttccagaagtatgctggaaaggatggttataactacactctctccaagacagagttcctaagcttcatgaatacagaactagctgccttcacaaagaaccagaaggaccctggtgtccttgaccgcatgatgaagaaactggacaccaacagtgatggtcagctagatttctcagaatttcttaatctgattggtggcctagctatggcttgccatgactccttcctcaaggctgtcccttcccagaagcggacctgaggaccccttggccctggccttcaaacccaccccctttccttccagcctttctgtcatcatctccacagcccacccatcccctgagcacactaaccacctcatgcaggccccacctgccaatagtaataaagcaatgtcacttttttaaaacatgaaa

SEQ ID NO: 975 - DNA, 2104 bp, Homo sapiens
gctgttgtcgctcgctcagcgtctccctctcggccgccctctcctcgggacgatggcgcgcggtggccgcggccgccgcctggggttagccctggggctgctgctggcgctggtgctggcgccgcgggttctgcgggccaagcccacggtgcgcaaagagcgcgtggtgcggcccgactcggagctgggcgagcggccccctgaggacaaccagagcttccagtacgaccacgaggccttcctgggcaaggaggactccaagaccttcgaccagctcaccccggacgagagcaaggagaggctagggaagattgttgatcgaatcgacaatgatggggatggctttgtcactactgaggagctgaaaacctggatcaaacgggtgcagaaaagatacatctttgataatgtcgccaaagtctggaaggattatgatagggacaaggatgataaaatttcctgggaagaatacaaacaagccacctatggttactacctaggaaaccccgcagagtttcatgattcttcagatcatcacacctttaaaaagatgctgccacgtgatgagagaagattcaaagctgcagacctcaatggtgacctgacagctactcgggaggagttcactgcctttctgcatcctgaagagtttgaacatatgaaggaaattgtggttttggaaaccctggaggacatcgacaagaacggggatgggtttgtggatcaggatgagtatattgcggatatgttttcccatgaggagaatggccctgagccagactgggttttatcagaacgggagcagtttaacgaattccgggatctgaacaaggacgggaagttagacaaagatgagattcgccactggatcctccctcaagattatgatcacgcacaggctgaggccaggcatctggtatatgaatcagacaaaaacaaggatgagaagctaactaaagaggaaatattggagaactggaacatgtttgttggaagccaagctaccaattacggggaagatctcacaaaaaatcatgatgagctttgatagacactcaccagaatatggcagactgtcataggcattctgttattgtcttggattgttgctacaattgtctaattacagcagttgtgatcccacaaaaagcaagtttatacctcagattggggtataaaaattgtttttcgctcagtatttactggaaaatggacatcactagtctttcagtaagatttctctcaaaacacgtgaaaaccttggtaaattgcaattctttctggggatatattggtacaacatgacttaaaacttttttttttctattaaaacttaaaggggaacaaaacttgaaaaagccctgttcttcagaaggtgagtgggttgagggaggcagtaatatgaagtgactgctgtgtattttaactaccagatttttatatttgccactgttagatagttggaaaggggaaattctgtttaagcgaaagtggtatcatcctaggtaagcttatttcagaacaagtctaatatatcagattctttcttttcgactttatactctgagttattacttactgtaagtggtgtatatgaaacctccatgcattttccagtatggatctgctaatatgcacagtaaatccatgtctttgtttgtttttctattaagaagcaatcaagaaagataatgtgaaaaagaaaggaatttagaggtagggaaaagatgaatgtcagacatgtgaagaactatagtaaaaatgataaaccacctaaatatccttgaacctaccttaaaatgccaatgaggtaggcctgatctttgaatagtggctaggatacaatgcatttcctcagtgatcactgattagaatgagttggtgggatccttgggaagccaaacggagcggggttctggatcatgtcccatccagtccagtgaatccccgacccgcagacctgccccccccgcaacagcttataccatggaatgaggacaaggtgatactctgagctgtggactgaactggcagacacaacctgtacagattgaaatttcaccttgtaaggaggaagtgaatgaaataaaggatccccctaagg

SEQ ID NO: 976 - DNA, 367 bp, Homo sapiens
acaagttactacaatagaaccgttttattaaacatatgcccgwatttatbycgtacaaaacggagtaacacttcttsttttcctctgcccccggaggcactaccgcagaacttcatgttcacagaaacacacgtcatggcamgygtgtcaaaacgtcatgacaagcmggaamgtgcaattctgaaagtaatgccacacaaccamcgcgggaaatgdaaacmggcagmggccagcaggtttctcggctagggctctgcctataccgccctggtcctgctcatctttcagcmgtaaacattttacggcgagaactcctgagcactatgtaagaamtctcccggtagsatccttccaattccatctatcc

SEQ ID NO: 977 - DNA, 2427 bp, Homo sapiens
gacgtttcgcgccaatttcggttggccggccacagtccaccgcgcggagattctcagcttccccaggagcaagacctctgagcccgccaagcgcggccgcacggccctcggcagcgatggcactgaaggactacgcgctagagaaggaaaaggttaagaagttcttacaagagttctaccaggatgatgaactcgggaagaagcagttcaagtatgggaaccagttggttcggctggctcatcgggaacaggtggctctgtatgtggacctggacgacgtagccgaggatgaccccgagttggtggactcaatttgtgagaatgccaggcgctacgcgaagctctttgctgatgccgtacaagagctgctgcctcagtacaaggagagggaagtggtaaataaagatgtcctggacgtttacattgagcatcggctaatgatggagcagcggagtcgggaccctgggatggtccgaagcccccagaaccagtaccctgctgaactcatgcgcagatttgagctgtattttcaaggccctagcagcagcaagcctcgtgtgatccgggaagtgcgggctgactctgtggggaagttggtaactgtgcgtggaatcgtcactcgtgtctctgaagtcaaacccaagatggtggtggccacttacacttgtgaccagtgtggggcagagacctaccagccgatccagtctcccactttcatgcctctgatcatgtgcccaagccaggagtgccaaaccaaccgctcaggagggcggctgtatctgcagacacggggctccagattcatcaaattccaggagatgaagatgcaagaacatagtgatcaggtgcctgtgggaaatatccctcgtagtatcacggtgctggtagaaggagagaacacaaggattgcccagcctggagaccacgtcagcgtcactggtattttcttgccaatcctgcgcactgggttccgacaggtggtacagggtttactctcagaaacctacctggaagcccatcggattgtgaagatgaacaagagtgaggatgatgagtctggggctggagagctcaccagggaggagctgaggcaaattgcagaggaggatttctacgaaaagctggcagcttcaatcgccccagaaatatacgggcatgaagatgtgaagaaggcactgctgctcctgctagtcgggggtgtggaccagtctcctcgaggcatgaaaatccggggcaacatcaacatctgtctgatgggggatcctggtgtggccaagtctcagctcctgtcatacattgatcgactggcgcctcgcagccagtacacaacaggccggggctcctcaggagtggggcttacggcagctgtgctgagagactccgtgagtggagaactgaccttagagggtggggccctggtgctggctgaccagggtgtgtgctgcattgatgagttcgacaagatggctgaggccgaccgcacagccatccacgaggtcatggagcagcagaccatctccattgccaaggccggcattctcaccacactcaatgcccgctgctccatcctggctgccgccaaccctgcctacgggcgctacaaccctcgccgcagcctggagcagaacatacagctacctgctgcactgctctcccggtttgacctcctctggctgattcaggaccggcccgaccgagacaatgacctacggttggcccagcacatcacctatgtgcaccagcacagccggcagcccccctcccagtttgaacctctggacatgaagctcatgaggcgttacatagccatgtgccgcgagaagcagcccatggtgccagagtctctggctgactacatcacagcagcatacgtggagatgaggcgagaggcttgggctagtaaggatgccacctatacttctgcccggaccctgctggctatcctgcgcctttccactgctctggcacgtctgagaatggtggatgtggtggagaaagaagatgtgaatgaagccatcaggctaatggagatgtcaaaggactctcttctaggagacaaggggcagacagctaggactcagagaccagcagatgtgatatttgccaccgtccgtgaactggtctcagggggccgaagtgtccggttctctgaggcagagcagcgctgtgtatctcgtggcttcacacccgcccagttccaggcggctctggatgaatatgaggagctcaatgtctggcaggtcaatgcttcccggacacggatcacttttgtctgattccagcctgcttgcaaccctggggtcctcttgttccctgctggcctgccccttgggaaggggcagtgatgcctttgaggggaaggaggagcccctctttctcccatgctgcacttactccttttgctaataaaagtgtttgtagattgtc

SEQ ID NO: 978 - DNA, 661 bp, Homo sapiens
cggccgcggatccattgtggtccgcttctctgcactatgtcgggtggcctcctgaaggcgctgcgcagcgactcctacgtggagctgagccagtaccgggaccagcacttccggggtgacaatgaagaacaagaaaaattactgaagaaaagctgtacgttatatgttggaaatctttctttttacacaactgaagaacaaatctatgaactcttcagcaaaagtggtgacataaagaaaatcattatgggtctggataaaatgaagaaaacagcatgtggattctgttttgtggaatattactcacgcgcagatgcggaaaactccatgcggtacataaatgggacgcgtctggatgaccgaatcattcgcacagactgggacgcaggctttaaggagggcaggcaatacggccgtgggcgatctgggggccaggttcgggatgagtatcggcaggactacgatgctgggagaggaggctatggaaaactggcacagaaccagtgagtggtgagagctctgtcagtgacaaacactcctttggcctgttgaatttgctgaagaacatcacctaaagtctgcacacgagcccatttttaccaagatttgagtcagtgtctttactgagctggaagcctctgaaagttattaaaggcagatc

SEQ ID NO: 979 - DNA, 328 bp, Homo sapiens
ggcaaaactgcctattctgctatttaaaaaccctcaatgactttattttctactgccgcctttttcatgtgcaccaaaatgaaaatgtttaaattaactgtgttgtacaaatggtacccaacacaaactttttttaaattagtaatacttttgtttaaagttttaagtttgcattttgactttttttgtaaggatgtatgttgtgtgtttaacctttattaactaacgttaaaagctgtgatgtgtgcgtagaatattacgtatgcatgttcatgtctaaagaatggctgttgatgataaaataaaaatcagctttcatttttctaaa

SEQ ID NO: 980 - DNA, 1049 bp, Homo sapiens
gtcttgatgcccaggttgtaaatggttacatgattcatgatcaggaaagcaaatcagaggttcagattccttaccctctgtcagaaaacaatcaagtgcagagtggaagagctttccatcacggaagattcatcatgagtctccggaaagcagctatggcagagcccaatgcaaagtttattggaggtgttgtgttacagttattagaggaagatgatgttgtgatgggagttcagtacaaggataaagagactggagatatcaaggaactccatgctccactgactgttgttgcagatgggcttttctccaagttcaggaaaagcctggtctccaataaagtttctgtatcatctcattttgttggctttcttatgaagaatgcaccacagtttaaagcaaatcatgctgaacttattttagctaacccgagtccagttctcatctaccagatttcatccagtgaaactcgagtacttgttgacattagaggagaaatgccaaggaatttaagagaatacatggttgaaaaaatttacccacaaatacctgatcacctgaaagaaccattcttagaagccactgacaattctcatctgaggtccatgccagcaagcttccttcctccttcatcagtgaagaaacgaggtgttcttcttttgggagacgcatataatatgaggcatccacttactggtggaggaatgactgttgcttttaaagatataaaactatggagaaaactgctaaagggtatccctgacctttatgatgatgcagctattttcgaggccaaaaaatcattttactgggcaagaaaaacatctcattcctttgtcgtgaatatccttgctcaggctctttatgaattattttctgccacagatgattccctgcatcaactaagaaaagcctgttttctttatttcaaacttggtggcgaatgtgttgcgggtcctgttgggctgctttctgtattgtctcctaaccctctagttttaattggacacttctttgctgttgcaatctatgccgtgtatttttgcttt

SEQ ID NO: 981 - DNA, 2476 bp, Homo sapiens
cggccagcacaccccggcacctcctctgcggcagctgcgcctcgcaagcgcagtgccgcagcgcacgccggagtggctgtagctgcctcggcgcggctgccgccctgcgcgggctgtgggctgcgggctgcgcccccgctgctggccagctctgcacggctgcgggctctgcggcgcccggtgctctgcaacgctgcggcgggcggcatgggataacgcggccatggtgcgccgagatcgcctccgcaggatgagggagtggtgggtccaggtggggctgctggccgtgcccctgcttgctgcgtacctgcacatcccaccccctcagctctcccctgcccttcactcatggaagtcttcaggcaagtttttcacttacaagggactgcgtatcttctaccaagactctgtgggtgtggttggaagtccagagatagttgtgcttttacacggttttccaacatccagctacgactggtacaagatttggaagggtctgaccttgaggtttcatcgggtgattgcccttgatttcttaggctttggcttcagtgacaaaccgagaccacatcactattccatatttgagcaggccagcatcgtggaagcgcttttgcggcatctggggctccagaaccgcagaatcaaccttctttctcatgactatggagatattgttgctcaggagcttctctacaggtacaagcagaatcgatctggtcggcataccataaagagtctctgtctgtcaaatggaggtatctttcctgagactcaccgtccactccttctccaaaagctactcaaagatggaggtgtgctgtcacccatcctcacacgactgatgaacttctttgtattctctcgaggtctcaccccagtctttgggccgtatactcggccctctgagagtgagctgtgggacatgtgggcagggatccgcaacaatgacgggaacttagtcattgacagtctcttacagtacatcaatcagaggaagaagttcagaaggcgctgggtgggagctcttgcctctgtaactatccccattcattttatctatgggccattggatcctgtaaatccctatccagagtttttggagctgtacaggaaaacgctgccgcggtccacagtgtcgattctggatgaccacattagccactatccacagctagaggatcccatgggcttcttgaatgcatatatgggcttcatcaactccttctgagctggaaagagtagcttccctgtattacctcccctactcccttatgtgttgtgtattccacttaggaagaaatgcccaaaagaggtcctggccatcaaacataattctctcacaaagtccactttactcaaattggtgaacagtgtataggaagaagccagcaggagctctgactaaggttgacataatagtccacctcccattactttgatatctgatcaaatgtatagacttggctttgttttttgtgctattaggaaattctgatgagcattactattcactgatgcagaaagacgttcttttgcataaaagacttttttttaacactttggacttctctgaaatatttagaagtgctaatttctggcccacccccaacaggaattctatagtaaggaggaggagaaggggggctccttccctctcctcgaatgacgttatgggcacatgccttttaaaagttctttaagcaacacagagctgagtcctctttgtcatacctttggatttagtgtttcatcagctgtttttagttataaacattttgttaaaatagatattggtttaaatgatacagtattttaggtatgatttaagactatgatttacctatacattatatatattttataaagatactaaaccagcatacccttactctgccagagtagtgaagctaattaaacacgtttggtttctgaataaattgaactaaatccaaactatttcctaaaatcacaggacattaaggaccaatagcatctgtgccagagatgtactgttattagctgggaagaccaattctaacagcaaataacagtctgagactcctcatacctcagtggttagaagcatgtctctcttgagctacagtagaggggaagggattgttgtgtagtcaagtcaccatgctgaatgtacactgattcctttatgatgactgcttaactccccactgcctgtcccagagaggctttccaatgtagctcagtaattcctgttactttacagacaggaaagttccagaaactttaagaacaaactctgaaagacctatgagcaaatggtgctgaatactttttttttaaagccacatttcattgtcttagtcaaagcaggattattaagtgattatttaaaattcgtttttttaaattagcaacttcaagtataacaactttgaaactggaataagtgtttattttctattaataaaaatgaattgtgacaaaaaaaaaaccg

SEQ ID NO: 982 - DNA, 380 bp, Homo sapiens
gtcggttgggtaggcagtcatggatcaggtaatgcagtttgttgagccaagtcggcagtttgtaaaggactccattcggctggttaaaagatgcactaaacctgatagaaaagaattccagaagattgccatggcaacagcaataggatttgctataatgggattcattggcttctttgtgaaattgatccatattcctattaataacatcattgttggtggctgaatacattttggaagagagtttttcatcttagagattggtgaacaagtgtgagggtgtgagaactcacagaatacaaatttgcctgtatgttttgtgggtttttttttttcctttcaagatgttttctatttccaaattaaagtaatttcaaagt

SEQ ID NO: 983 - DNA, 287 bp, Homo sapiens
  misc_feature (1)...(287): n=a,t,g or c
ctgagtcgaggttatgtacttcctgttgtcagttacatccgaaagtgtctggagaagctggacactgacatttcactcattcgctattttgtcactgaggtgctggacgtcattgctcctccttatncctctgacttcgtgcaacttttcctccccatcctggagaatgacagnatcgnaggtnccatcanaacggaaggtgagcatgaccctgtgacggagtttatagctcactgcaantctaactacatcatggtgaactaatttagagcatcctccagagctga

SEQ ID NO: 984 - DNA, 2047 bp, Homo sapiens
gtcgcggctcgagagcgagagtcacgtcccggcgctagcccagcccgacccaggcccaccgtggtgcacgcaaaccacttcctggccatgcgctccctcctgcttctcagcgccttctgcctcctggaggcggccctggccgccgaggtgaagaaacctgcagccgcagcagctcctggcactgcggagaagttgagccccaaggcggccacgcttgccgagcgcagcgccggcctggccttcagcttgtaccaggccatggccaaggaccaggcagtggagaacatcctggtgtcacccgtggtggtggcctcgtcgctggggctcgtgtcgctgggcggcaaggcgaccacggcgtcgcaggccaaggcagtgctgagcgccgagcagctgcgcgacgaggaggtgcacgccggcctgggcgagctgctgcgctcactcagcaactccacggcgcgcaacgtgacctggaagctgggcagccgactgtacggacccagctcagtgagcttcgctgatgacttcgtgcgcagcagcaagcagcactacaactgcgagcactccaagatcaacttccgcgacaagcgcaggccgctgcagtccatcaacgagtgggccgcgcagaccaccgacggcaagctgcccgaggtcaccaaggacgtggagcgcacggacggcgccctgttagtcaacgccatgttcttcaagccacactgggatgagaaattccaccacaagatggtggacaaccgtggcttcatggtgactcggtcctataccgtgggtgtcatgatgatgcaccggacaggcctctacaactactacgacgacgagaaggaaaagctgcaaatcgtggagatgcccctggcccacaagctctccagcctcatcatcctcatgccccatcacgtggagcctctcgagcgccttgaaaagctgctaaccaaagagcagctgaagatctggatggggaagatgcagaagaaggctgttgccatctccttgcccaagggtgtggtggaggtgacccatgacctgcagaaacacctggctgggctgggcctgactgaggccattgacaagaacaaggccgacttgtcacgcatgtcaggcaagaaggacctgtacctggccagcgtgttccacgccaccgcctttgagttggacacagatggcaacccctttgaccaggacatctacgggcgcgaggagctgcgcagccccaagctgttctacgccgaccaccccttcatcttcctagtgcgggacacccaaagcggctccctgctattcattgggcgcctggtccggcctaagggtgacaagatgcgagacgagttatagggcctcagggtgcacacaggatggcaggaggcatccaaaggctcctgagacacatgggtgctattggggttgggggggaggtgaggtaccagccttggatactccatggggtgggggtggaaaagcagaccggggttcccgtgtgcctgagcggaccttcccagctagaattcactccacttggacatgggccccagataccatgatgctgagcccggaaactccacatcctgtgggacctgggccatagtcattctgcctgccctgaaagtcccagatcaagcctgcctcaatcagtattcatatttatagccaggtaccttctcacctgtgagaccaaattgagctaggggggtcagccagccctcttctgacactaaaacacctcagctgcctccccagctctatcccaacctctcccaactataaaactaggtgctgcagcccctgggaccaggcacccccagaatgacctggccgcagtgaggcggattgagaaggagctcccaggaggggcttctgggcagactctggtcaagaagcatcgtgtctggcgttgtggggatgaactttttgttttgtttcttccttttttagttcttcaaagatagggagggaagggggaacatgagcctttgttgctatcaatccaagaacttatttgtacattttttttttcaataaaacttttccaatgacattt

SEQ ID NO: 985 - DNA, 3614 bp, Homo sapiens
ctgaggaagtgggacctccccttttgggtcggtagttcagcgccggcgccggtgtgcgagccgcggcagagtgaggcaggcaacccgaggtgcggagcgacctgcggaggctgagccccgctttctcccagggtttcttatcagccagccgccgctgtccccgggggagtaggaggctcctgacaggccgcggctgtctgtgtgtccttctgagtgtcagaggaacggccagaccccgcgggccggagcagaacgcggccagggcagaaagcggcggcaggagaagcaggcagggggccggaggacgcagaccgagacccgaggcggaggcggaccgcgagccggccatgtcggtggtggggttggacgtgggctcgcagagctgctacatcgcggtagcccgggccgggggcatcgagaccatcgccaatgagttcagcgaccggtgcaccccgtcagtcatatcatttggatcaaaaaatagaacaatcggagttgcagccaaaaatcagcaaatcactcatgcaaacaatacggtgtctaacttcaaaagatttcatggccgagcattcaatgaccccttcattcaaaaggagaaggaaaacttgagttacgatttggttccattgaaaaatggtggagttggaataaaggtaatgtacatgggtgaagaacatctatttagtgtggagcagataacagccatgttgttgactaagctgaaggaaactgctgaaaacagcctcaagaaaccagtaacagattgtgttatttcagtcccctccttctttacagatgctgagaggcgatctgtgttagatgctgcacagattgttggcctaaactgtttaagacttatgaatgacatgacagctgttgctttgaattacggaatttataagcaggatctcccaagcctggatgagaaacctcggatagtggtttttgttgatatgggacattcagcttttcaagtgtctgcttgtgcttttaacaagggaaaattgaaggtactgggaacagcttttgatcctttcttaggaggaaaaaacttcgatgaaaagttagtggaacatttttgtgcagaatttaaaactaagtacaagttggatgcaaaatccaaaatacgagcactcctacgtctgtatcaggaatgtgaaaaactgaaaaagctaatgagctctaacagcacagaccttccactgaatatcgaatgctttatgaatgataaagatgtttccggaaagatgaacaggtcacaatttgaagaactctgtgctgaacttctgcaaaagatagaagtacccctttattcactgttggaacaaactcatctcaaagtagaagatgtgagtgcagttgagattgttggaggcgctacacgaattccagctgtgaaggaaagaattgccaaattctttggaaaagatattagcacaacactcaatgcagatgaagcagtagccagaggatgtgcattacagtgtgcaatactttccccggcatttaaagttagagaattttccgtcacagatgcagttccttttccaatatctctgatctggaaccatgattcagaagatactgaaggtgttcatgaagtctttagtcgaaaccatgctgctcctttctccaaagttctcacctttctgagaagggggccttttgagctagaagctttctattctgatccccaaggagttccatatccagaagcaaaaataggccgctttgtagttcagaatgtttctgcacagaaagatggagaaaaatctagagtaaaagtcaaagtgcgagtcaacacccatggcattttcaccatctctacggcatctatggtggagaaagtcccaactgaggagaatgaaatgtcttctgaagctgacatggagtgtctgaatcagagaccaccagaaaacccagacactgataaaaatgtccagcaagacaacagtgaagctggaacacagccccaggtacaaactgatgctcaacaaacctcacagtctcccccttcacctgaacttacctcagaagaaaacaaaatcccagatgctgacaaagcaaatgaaaaaaaagttgaccagcctccagaagctaaaaagcccaaaataaaggtggtgaatgttgagctgcctattgaagccaacttggtctggcagttagggaaagaccttcttaacatgtatattgagacagagggtaagatgataatgcaagataaattggaaaaagaaaggaatgatgctaaaaatgcagttgaggaatatgtgtatgagttcagagacaagctgtgtggaccatatgaaaaatttatatgtgagcaggatcatcaaaattttttgagactcctcacagaaactgaagactggctgtatgaagaaggagaggaccaagctaaacaagcatatgttgacaagttggaagaattaatgaaaattggcactccagttaaagttcggtttcaggaagctgaagaacggccaaaaatgtttgaagaactaggacagaggctgcagcattatgccaagatagcagctgacttcagaaataaggatgagaaatacaaccatattgatgagtctgaaatgaaaaaagtggagaagtctgttaatgaagtgatggaatggatgaataatgtcatgaatgctcaggctaaaaagagtcttgatcaggatccagttgtacgtgctcaggaaattaaaacaaaaatcaaggaattgaacaacacatgtgaacccgttgtaacacaaccgaaaccaaaaattgaatcacccaaactggaaagaactccaaatggcccaaatattgataaaaaggaagaagatttagaagacaaaaacaattttggtgctgaacctccacatcagaatggtgaatgttaccctaatgagaaaaattctgttaatatggacttggactagataaccttaaattggcctattccttcaattaataaaatatttttgccatagtatgtgactctacataacatactgaaactatttatattttcttttttaaggatatttagaaattttgtgtattatatggaaaaagaaaaaaagcttaagtctgtagtctttatgatcctaaaagggaaaattgccttggtaactttcagattcctgtggaattgtgaattcatactaagctttctgtgcagtctcaccatttgcatcactgaggatgaaactgacttttgtcttttggagaaaaaaaactgtactgcttgttcaagagggctgtgattaaaatctttaagcatttgttcctgccaaggtagttttcttgcattttgctctccattcagcatgtgtgtgggtgtggatgtttataaacaagactaagtctgacttcataagggctttctaaaaccatttctgtccaagagaaaatgactttttgctttgatattaaaaattcaatgagtaaaacaaaagctagtcaaatgtgttagcagcatgcagaacaaaaactttaaactttctctctcactatacagtatattgtcatgtgaaagtgtggaatggaagaaatgtcgatcctgttgtaactgattgtgaacacttttatgagctttaaaataaagttcatcttatggtgtcatttct

SEQ ID NO: 986 - DNA, 409 bp, Homo sapiens
  misc_feature (1)...(409): n=a,t,g or c
tgaaaagcctgtaagaaatacaggatttgataatattttgaaggcaggaaaaacccaaattgtttcttctttgagagtcatgactaccttctggtgtggagaaattgccattggaaaatttgacaattttgattctcactggtatgtttaaaaactgaataaaaggaatagaatttttttttgataaaggatcacaaaacaattctaaaacctaactgtttttaccattgaaatttaaattgtgataataggttttaaatgtctaggaatgcaactgatagggcttttcttggaactgttagtttttttgaagtagttttttcatgtttaatttgtatttgttaaaaaaacaaaaaggcaaaaattccccaaaaccccggttaaccaccnggggcaaaacngttgtggc

SEQ ID NO: 987 - DNA, 390 bp, Homo sapiens
  misc_feature (1)...(390): n=a,t,g or c
atcttanttaaaacctttttnacaatttattncctgttgnnaanctttaaaaatgaggtnctagctaagtgcagggtttcagtggtgaaattttgaccatgtgaacacataaataaatatttacagtctttggcaaaacacatgacgtttcatcaacctatacgataaatttgtttagaaaancataaataatttacaaaaaatatggtacattctaaatattcacatcatcgtcactcccacaccattgtacggttgaccccacaacacagaaacaggaaaacctgcacgctgttgacagtcgctacatttnatgaggtatcccaacgcttcgttggtctcggggantacaggctccacaggcaaaaaggtaaaaagtgcaggcaaanc

SEQ ID NO: 988 - DNA, 535 bp, Homo sapiens
  misc_feature (1)...(535): n=a,t,g or c
cattgttgccattggcaggttttggcaatgtttgggggntaaagnacagttagnaaatattattcagttaaacaataatgtgtgaacttttaagatggataatagggncatggnactgagtgctgnctatcttgtaaatgtgcacaggtacacttaccttttttttttttttttttttaagtttttcccattcaggaaaacaacattgtgatctgtactacagggaaccaaatgtcatgcgtcatacatgtgggtataaagtacataaaatatatctaactattcataatgtggggtgggtaatactgtctgtgaaataatgtaagaagcttttcacttaaaaaaaatgcattactttcacttaacactagacaccaggtcgaaaattttcaaggttatagtacttatttcaacaattcttgagatgctagctagtgttgaagctaaaaatagctttatttatgctgaattgtgatttttttatgccaaaatttttttngggtctaatcattgatgangcctgggnattaatntt

SEQ ID NO: 989 - DNA, 370 bp, Homo sapiens
  misc_feature (1)...(370): n=a,t,g or c
gggtgctttatttccatgctgggcgcccgggaagtatgtacacggggtacgtgccaagcatcctcgcgcgaccccgagagcccggggagcgggngcttgccggccgtcgcactcatttacccggagacagggagaggctcttctgcgtgaagcggttgtgcagagcctcatgcatcacggagcatgagaagatgttcccctgctgccacctgctcttgtccacggtgagcttgctgtagaggaagaaggagccgtcggagtncagcatggggaggcntgggtnttgtagttnttctccggctgcccgctgctttcccantccacgggcgatgtcgctgggggtagaagcctttgaacagggaagtcaggc

SEQ ID NO: 990 - DNA, 395 bp, Homo sapiens
  misc_feature (1)...(395): n=a,t,g or c
tttgttacttttacatgatctttattatttaagaaaaacctcttttaaccatttatataacagaaaaaaaatagggaggctggtagatcatcacatatatagtagctaaaatatgaaaggccagggaatttattattaatgaagtcataaaacagacttaaccaaaagtgtgtgctaggaaacaagcagtttcacttcagagacttcattgcaggaacccagtttccttatgtggaaaaaagtgattataaataacagttatctgaaaggtggttgagaggattaaatgagatcacctatgcaaacaaatacatgtaggtatgaaagaccatccgtcctgggggtngtggaaagtttaagtttccccnccagaacccttccctttaagggcctta

SEQ ID NO: 991 - DNA, 2133 bp, Homo sapiens
cgggagagcgcgctctgcctgccgcctgcctgcctgccactgagggttcccagcaccatgagggcctggatcttctttctcctttgcctggccgggagggccttggcagcccctcagcaagaagccctgcctgatgagacagaggtggtggaagaaactgtggcagaggtgactgaggtatctgtgggagctaatcctgtccaggtggaagtaggagaatttgatgatggtgcagaggaaaccgaagaggaggtggtggcggaaaatccctgccagaaccaccactgcaaacacggcaaggtgtgcgagctggatgagaacaacacccccatgtgcgtgtgccaggaccccaccagctgcccagcccccattggcgagtttgagaaggtgtgcagcaatgacaacaagaccttcgactcttcctgccacttctttgccacaaagtgcaccctggagggcaccaagaagggccacaagctccacctggactacatcgggccttgcaaatacatccccccttgcctggactctgagctgaccgaattccccctgcgcatgcgggactggctcaagaacgtcctggtcaccctgtatgagagggatgaggacaacaaccttctgactgagaagcagaagctgcgggtgaagaagatccatgagaatgagaagcgcctggaggcaggagaccaccccgtggagctgctggcccgggacttcgagaagaactataacatgtacatcttccctgtacactggcagttcggccagctggaccagcaccccattgacgggtacctctcccacaccgagctggctccactgcgtgctcccctcatccccatggagcattgcaccacccgctttttcgagacctgtgacctggacaatgacaagtacatcgccctggatgagtgggccggctgcttcggcatcaagcagaaggatatcgacaaggatcttgtgatctaaatccactccttccacagtaccggattctctctttaaccctccccttcgtgtttcccccaatgtttaaaatgtttggatggtttgttgttctgcctggagacaaggtgctaacatagatttaagtgaatacattaacggtgctaaaaatgaaaattctaacccaagacatgacattcttagctgtaacttaactattaaggccttttccacacgcattaatagtcccatttttctcttgccatttgtagctttgcccattgtcttattggcacatgggtggacacggatctgctgggctctgccttaaacacacattgcagcttcaacttttctctttagtgttctgtttgaaactaatacttaccgagtcagactttgtgttcatttcatttcagggtcttggctgcctgtgggcttccccaggtggcctggaggtgggcaaagggaagtaacagacacacgatgttgtcaaggatggttttgggactagaggctcagtggtgggagagatccctgcagaatccaccaaccagaacgtggtttgcctgaggctgtaactgagagaaagattctggggctgtcttatgaaaatatagacattctcacataagcccagttcatcaccatttcctcctttacctttcagtgcagtttcttttcacattaggctgttggttcaaacttttgggagcacggactgtcagttctctgggaagtggtcagcgcatcctgcagggcttctcctcctctgtcttttggagaaccagggctcttctcaggggctctagggactgccaggctgtttcagccaggaaggccaaaatcaagagtgagatgtagaaagttgtaaaatagaaaaagtggagttggtgaatcggttgttctttcctcacatttggatgattgtcataaggtttttagcatgttcctccttttcttcaccctcccctttgttcttctattaatcaagagaaacttcaaagttaatgggatggtcggatctcacaggctgagaactcgttcacctccaagcatttcatgaaaaagctgcttcttattaatcatacaaactctcaccatgatgtgaagagtttcacaaatctttcaaaataaaaagtaatgacttagaaactgaaaaaaaaaaaaaaaaaaaaaaaaaaaaaa

SEQ ID NO: 992 - DNA, 5416 bp, Homo sapiens; identical to SEQ ID NO: 429

SEQ ID NO: 993 - DNA, 4792 bp, Homo sapiens
ggaccacccagtaccgatcccttcacgaccgtcaccatggaagtgtcaccattgcagcctgtaaatgaaaatatgcaagtcaacaaaataaagaaaaatgaagatgctaagaaaagactgtctgttgaaagaatctatcaaaagaaaacacaattggaacatattttgctccgcccagacacctacattggttctgtggaattagtgacccagcaaatgtgggtttacgatgaagatgttggcattaactatagggaagtcacttttgttcctggtttgtacaaaatctttgatgagattctagttaatgctgcggacaacaaacaaagggacccaaaaatgtcttgtattagagtcacaattgatccggaaaacaatttaattagtatatggaataatggaaaaggtattcctgttgttgaacacaaagttgaaaagatgtatgtcccagctctcatatttggacagctcctaacttctagtaactatgatgatgatgaaaagaaagtgacaggtggtcgaaatggctatggagccaaattgtgtaacatattcagtaccaaatttactgtggaaacagccagtagagaatacaagaaaatgttcaaacagacatggatggataatatgggaagagctggtgagatggaactcaagcccttcaatggagaagattatacatgtatcacctttcagcctgatttgtctaagtttaaaatgcaaagcctggacaaagatattgttgcactaatggtcagaagagcatatgatattgctggatccaccaaagatgtcaaagtctttcttaatggaaataaactgccagtaaaaggatttcgtagttatgtggacatgtatttgaaggacaagttggatgaaactggtaactccttgaaagtaatacatgaacaagtaaaccacaggtgggaagtgtgtttaactatgagtgaaaaaggctttcagcaaattagctttgtcaacagcattgctacatccaagggtggcagacatgttgattatgtagctgatcagattgtgactaaacttgttgatgttgtgaagaagaagaacaagggtggtgttgcagtaaaagcacatcaggtgaaaaatcacatgtggatttttgtaaatgccttaattgaaaacccaacctttgactctcagacaaaagaaaacatgactttacaacccaagagctttggatcaacatgccaattgagtgaaaaatttatcaaagctgccattggctgtggtattgtagaaagcatactaaactgggtgaagtttaaggcccaagtccagttaaacaagaagtgttcagctgtaaaacataatagaatcaagggaattcccaaactcgatgatgccaatgatgcagggggccgaaactccactgagtgtacgcttatcctgactgagggagattcagccaaaactttggctgtttcaggccttggtgtggttgggagagacaaatatggggttttccctcttagaggaaaaatactcaatgttcgagaagcttctcataagcagatcatggaaaatgctgagattaacaatatcatcaagattgtgggtcttcagtacaagaaaaactatgaagatgaagattcattgaagacgcttcgttatgggaagataatgattatgacagatcaggaccaagatggttcccacatcaaaggcttgctgattaattttatccatcacaactggccctctcttctgcgacatcgttttctggaggaatttatcactcccattgtaaaggtatctaaaaacaagcaagaaatggcattttacagccttcctgaatttgaagagtggaagagttctactccaaatcataaaaaatggaaagtcaaatattacaaaggtttgggcaccagcacatcaaaggaagctaaagaatactttgcagatatgaaaagacatcgtatccagttcaaatattctggtcctgaagatgatgctgctatcagcctggcctttagcaaaaaacagatagatgatcgaaaggaatggttaactaatttcatggaggatagaagacaacgaaagttacttgggcttcctgaggattacttgtatggacaaactaccacatatctgacatataatgacttcatcaacaaggaacttatcttgttctcaaattctgataacgagagatctatcccttctatggtggatggtttgaaaccaggtcagagaaaggttttgtttacttgcttcaaacggaatgacaagcgagaagtaaaggttgcccaattagctggatcagtggctgaaatgtcttcttatcatcatggtgagatgtcactaatgatgaccattatcaatttggctcagaattttgtgggtagcaataatctaaacctcttgcagcccattggtcagtttggtaccaggctacatggtggcaaggattctgctagtccacgatacatctttacaatgctcagctctttggctcgattgttatttccaccaaaagatgatcacacgttgaagtttttatatgatgacaaccagcgtgttgagcctgaatggtacattcctattattcccatggtgctgataaatggtgctgaaggaatcggtactgggtggtcctgcaaaatccccaactttgatgtgcgtgaaattgtaaataacatcaggcgtttgatggatggagaagaacctttgccaatgcttccaagttacaagaacttcaagggtactattgaagaactggctccaaatcaatatgtgattagtggtgaagtagctattcttaattctacaaccattgaaatctcagagcttcccgtcagaacatggacccagacatacaaagaacaagttctagaacccatgttgaatggcaccgagaagacacctcctctcataacagactatagggaataccatacagataccactgtgaaatttgttgtgaagatgactgaagaaaaactggcagaggcagagagagttggactacacaaagtcttcaaactccaaactagtctcacatgcaactctatggtgctttttgaccacgtaggctgtttaaagaaatatgacacggtgttggatattctaagagacttttttgaactcagacttaaatattatggattaagaaaagaatggctcctaggaatgcttggtgctgaatctgctaaactgaataatcaggctcgctttatcttagagaaaatagatggcaaaataatcattgaaaataagcctaagaaagaattaattaaagttctgattcagaggggatatgattcggatcctgtgaaggcctggaaagaagcccagcaaaaggttccagatgaagaagaaaatgaagagagtgacaacgaaaaggaaactgaaaagagtgactccgtaacagattctggaccaaccttcaactatcttcttgatatgcccctttggtatttaaccaaggaaaagaaagatgaactctgcaggctaagaaatgaaaaagaacaagagctggacacattaaaaagaaagagtccatcagatttgtggaaagaagacttggctacatttattgaagaattggaggctgttgaagccaaggaaaaacaagatgaacaagtcggacttcctgggaaaggggggaaggccaaggggaaaaaaacacaaatggctgaagttttgccttctccgcgtggtcaaagagtcattccacgaataaccatagaaatgaaagcagaggcagaaaagaaaaataaaaagaaaattaagaatgaaaatactgaaggaagccctcaagaagatggtgtggaactagaaggcctaaaacaaagattagaaaagaaacagaaaagagaaccaggtacaaagacaaagaaacaaactacattggcatttaagccaatcaaaaaaggaaagaagagaaatccctggcctgattcagaatcagataggagcagtgacgaaagtaattttgatgtccctccacgagaaacagagccacggagagcagcaacaaaaacaaaattcacaatggatttggattcagatgaagatttctcagattttgatgaaaaaactgatgatgaagattttgtcccatcagatgctagtccacctaagaccaaaacttccccaaaacttagtaacaaagaactgaaaccacagaaaagtgtcgtgtcagaccttgaagctgatgatgttaagggcagtgtaccactgtcttcaagccctcctgctacacatttcccagatgaaactgaaattacaaacccagttcctaaaaagaatgtgacagtgaagaagacagcagcaaaaagtcagtcttccacctccactaccggtgccaaaaaaagggctgccccaaaaggaactaaaagggatccagctttgaattctggtgtctctcaaaagcctgatcctgccaaaaccaagaatcgccgcaaaaggaagccatccacttctgatgattctgactctaattttgagaaaattgtttcgaaagcagtcacaagcaagaaatccaagggggagagtgatgacttccatatggactttgactcagctgtggctcctcgggcaaaatctgtacgggcaaagaaacctataaagtacctggaagagtcagatgaagatgatctgttttaaaatgtgaggcgattattttaagtaattatcttaccaagcccaagactggttttaaagttacctgaagctcttaacttcctcccctctgaatttagtttggggaaggtgtttttagtacaagacatcaaagtgaagtaaagcccaagtgttctttagcttt

SEQ ID NO: 994 - DNA, 1977 bp, Homo sapiens
cactccagtgtggcatcatgtggcagctgctcctcccaactgctctgctacttctagtttcagctggcatgcggactgaagatctcccaaaggctgtggtgttcctggagcctcaatggtacagggtgctcgagaaggacagtgtgactctgaagtgccagggagcctactcccctgaggacaattccacacagtggtttcacaatgagaacctcatctcaagccaggcctcgagctacttcattgacgctgccacagtcgacgacagtggagagtacaggtgccagacaaacctctccaccctcagtgacccggtgcagctagaagtccatgtcggctggctgttgctccaggcccctcggtgggtgttcaaggaggaagaccctattcacctgaggtgtcacagctggaagaacactgctctgcataaggtcacatatttacagaatggcaaagacaggaagtattttcatcataattctgacttccacattccaaaagccacactcaaagatagcggctcctacttctgcagggggcttgttgggagtaaaaatgtgtcttcagagactgtgaacatcaccatcactcaaggtttggcagtgtcaaccatctcatcattctctccacctgggtaccaagtctctttctgcttggtgatggtactcctttttgcagtggacacaggactatatttctctgtgaagacaaacatttgaagctcaacaagagactggaaggaccataaacttaaatggagaaaggaccctcaagacaaatgacccccatcccatgggagtaataagagcagtggcagcagcatctctgaacatttctctggatttgcaaccccatcatcctcaggcctctctacaagcagcaggaaacatagaactcagagccagatcctttatccaactctcgatttttccttggtctccagtggaagggaaaagcccatgatcttcaagcagggaagccccagtgagtagctgcattcctagaaattgaagtttcagagctacacaaacactttttctgtcccaaccattccctcacagtaaaacaacaatacaggctagggatggtaatcctttaaacatacaaaaattgctcgtattataaattacccagtttagaggggaaaaaagaaaataattattcctaaacaaatggataagtagaattaatgattgaggcaggaccctacagagtgtgggaactgctggggatctagagaattcagtgggaccaatgaaagcatggctgagaaatagcagggtagtccaggatagtctaagggaggtgttcccatctgagcccagagataagggtgtcttcctagaacattagccgtagtggaattaacaggaaatcatgagggtgacgtagaattgagtcttccaggggactctatcagaactggaccatttccaagtatataacgatgagccctctaatgctaggagtagcaaatggtcctaggaaggggactgaggattggggtgggggtggggtggaaaagaaagtacagaacaaaccctgtgtcactgtcccaagttaagctaagtgaacagaactatctcagcatcagaatgagaatgagaaagcctgagaagaaagaaccaaccacaagcacacaggaaggaaagcgcaggaggtgaaaatgctttcttggccagggtagtaagaattagaggttaatgcagggactgtaaaaccaccttttctgcttcaatgtctagttcctgtatagctttgttcattgcatttattaaacaaatgttgtataaccaatactaaatgtactactgagcttcactgagttacgctgtgaaactttcaaatccttcttcagtcagttccaatgaggtggggatggagaagacaattgttgcttatgaaaaaaagctttagctgtctcctgttttgtaagctttcagtgcaacatttcttggttccaataaagcattttac

SEQ ID NO: 995 - DNA, 2271 bp, Homo sapiens
tggccggaattccggggagggagaagcccctttggcctgccttacggaagcctgcgagggagggtggtgtccactgcccagttccgtgtcccgatgcccagcgccacgcagcgcaagagtcaggagaagccgcgggagatcatggacgcggcggaagattatgctaaagagagatatggaatatcttcaatgatacaatcacaagaaaaaccagatcgagttttggttcgggttagagacttgacaatacaaaaagctgatgaagttgtttgggtacgtgcaagagttcatacaagcagagctaaagggaaacagtgcttcttagtcctacgtcagcagcagtttaatgtccaggctcttgtggcggtgggagaccatgcaagcaagcagatggttaaatttgctgccaacatcaacaaagagagcattgtggatgtagaaggtgttgtgagaaaagtgaatcagaaaattggaagctgtacacagcaagacgttgagttacatgttcagaagatttatgtgatcagtttggctgaaccccgtctgcccctgcagctggatgatgctgttcggcctgagcaagaaggagaagaggaaggaagagctactgttaaccaggatacaagattagacaacagagtcattgatcttaggacatcaactagtcaggcagtcttccgtctccagtctggcatctgccatctcttccgagaaactttaattaacaaaggttttgtggaaatccaaactcctaaaattatttcagctgccagtgaaggaggagccaatgtttttactgtgtcatattttaaaaataatgcatacctggctcagtccccacagctatataagcaaatgtgcatttgtgctgattttgagaaggttttctctattggaccagtattcagagcggaagactctaatacccatagacatctaactgagtttgttggtttggacattgaaatggcttttaattaccattaccacgaagttatggaagaaattgctgacaccatggtacaaatattcaaaggacttcaagaaaggtttcagactgaaattcaaacagtgaataaacagttcccatgtgagccattcaaatttttggagccaactctaagactagaatattgtgaagcattggctatgcttagggaagctggagtcgaaatgggagatgaagacgatctgagcacaccaaatgaaaagctgttgggtcatttggtaaaggaaaagtatgatacagatttttatattcttgataaatatccattggctgtaagacctttctataccatgcctgacccaagaaatcccaaacagtccaagtcttacgatatgttcatgagaggagaagaaatattgtcaggagctcaaagaatacatgatcctcaactgctaacagagagagctttacatcatggaaatgatttggagaaaattaaggcttacattgattccttccgctttggagcccctcctcatgctggtggaggcattggattggaacgagttactatgctgtttctgggattgcataatgttcgtcagacctccatgttccctcgtgatcccaaacgactcactccttaaattcacactttgccacttaactccagtgtggatgacagagcgagaccctgcctcaaaaaaaaaaaaaaaaaaaaaaaaaaaaaaaaaaaaaaaaaaaaaaaaaaaaaaaaaaaaaagaaagccacacttattcttttcagtaacctgctagtgcacaggctgtactttaggtacttaaaatatgcactagaataaatttgcaaggccctaaaatatcactgttatttttggagtaattcagtataggttcgtttaaaagagatttttataacttcagacatgcatcagtaggaaataacttgagaaattcatatggttatgttacaaattcatattctgttactacagtaaacgttaagagttttaaacagttaagattgtacaatttttcttcttttctatattacaagggccccagtgttaatgtcttagattttcagtatttgaacttatttttttaaattctgtcattgagataagaataattcaggtagcatctgaaattttaatgaatgtataattggcatatcatggaaaattaaccagaaagtatcagttcttaaaagttatgcctagaaattatgtaaagctaaactactggttagaaagtattcagtgtaatattgtattaatttgttaaattctaaacttgaatttcaataaaattttaaagct

SEQ ID NO: 996 - DNA, 3311 bp, Homo sapiens
ggatccttccaccttgcctaccaaagtggggatgaaagtttgtctggggcattgcagttttagacaggaagaccagggaaggcctcactgagaaggtgacatttgagccaagacttaaaaaggtacgaaagtgagccatgtggaagtcttggggggaggagtgaactaggcagaggcacagctgggcaaagggcctgaggtgtgaccatgcctatggatttgaggaacttcaaagaggctgtgtgctgcaggagagtgaagggcagggagtggcaggaaatgaaggcagacaggtagcagtggggaggacgcaggggtccagctcatgtaggtcttgattggacacagtgagtttcagatgacagcctcctgtctcatggggtagccccaaagccacaggagtctggtgatttccctcttccccaccagacatctatgccatcggggtgggcaagctggatgtggactggagagaactgaatgagctagggtccaagaaggatggtgagaggcatgccttcattctgcaggacacaaaggctctgcaccaggtctttgaacatatgctgggtgagtgagctttgccctccttggtgtggggaggatggtgaggagcccgccaaaggcccgttttgggaacctggacacagtgcccctcacttgcctccttccccatctgatcctcacacccacagatgtctccaagctcacagacaccatctgcggggtggggaacatgtcagcaaacgcctctgaccaggagaggacaccctggcatgtcactattaaggtaccaggaaggaggggcagggcttggattccagaggtaaaagcggccatgggccagacatactgcaatctctgaaaatcacctgttcccctgcagcccaagagccaagagacctgccggggggccctcatctccgaccaatgggtcctgacagcagctcattgcttccgcgatggcaacgaccactccctgtggagggtcaatgtgggtaaggcaggggatgcaccagcctcctgatccgtgaagccacagatcctaccacctcacccagcctctggcccctgcaggagccctggtctagcctaatctagtgtatcatttccaggagaccccaaatcccagtggggcaaagaattccttattgagaaggcggtgatctccccagggtttgatgtctttgccaaaaagaaccagggaatcctggagttctatggtgatgacatagctctgctgaagctggcccagaaagtaaagatgtccacccatgccaggtgcctggagtcttggatgggagggtgccctgcagggaagagtgctctggagatccctggaagagactactggggacaggctggtgtgacccttgctcttctccccaggcccatctgccttccctgcacgatggaggccaatctggctctgcggagacctcaaggcagcacctgtagggaccatggtgagtgctgggacttatggtgcttgagagctggggccggggtttgggggtgataacaaggactaggctgcagtccccaagccaggaacctggattctgggtaaaaggaccagcaccaacatccccttctcttgactatagagaatgaactgctgaacaaacagagtgttcctgctcattttgtcgccttgaatgggagcaaactgaacattaaccttaagatgggagtggaggtgagggtctcaggttggggatgctgggatccccctgtgacagctcccagaatgtctctcttccttctccaggtctggctgctttctctctctgacgcgggtcacccctcctcccaagcctcacaaacctgctaggtgtccctgggtctgcttattctttttttgttgttattgagatggagtcttgctctgtctcccaggctggagtgcagtggcacgacctcagctcactgcaacttctgcctcctgggttcaagcgattctcctacttcagcctcccgagtagctgagattacaggtgcccaccaccacaccagctaatttttgtatttttagtagagacgggacttcgccatgttggccaggatggtcttgaactcctgacctcaagtgatctgcctgcctcaacctcccaaagtgctgagattacaggcgtgagccactgcaccccacccgggtctgcttattctacccttctctctggttccacccctgctgcagtggacaagctgtgccgaggttgtctcccaagaaaaaaccatgttccccaacttgacagatgtcagggaggtggtgacagaccagttcctatgcagtgggacccaggaggatgagagtccctgcaagggtgagtccctcaccatgcctggattcccaaggggaaggccacctgtgtctctgtggccagcatgcatgccagaacaccagtccactgccctagatgacactgtctcctgtcaccctttgctggcaggagaatctgggggagcagttttccttgagcggagattcaggttttttcaggtgagaaggtagaagcttgcaggacccaggggttacaggatctcagccttgttggggggatgagggaggcctttgagggatctagggaggttggggcttacagttggggctgtggcagcctcccagccagttctctccttttctccaggtgggtctggtgagctggggtctttacaacccctgccttggctctgctgacaaaaactcccgcaaaagggcccctcgtagcaaggtcccgccgccacgagactttcacatcaatctcttccgcatgcagccctggctgaggcagcacctgggggatgtcctgaattttttacccctctagccatggccactgagccctctgctgccctgccagaatctgccgcccctccatcttctacctctgaatggccacccttagaccctgtgatccatcctctctcctagctgagtaaatccgggtctctaggatgccagaggcagcgcacacaagctgggaaatcctcagggctcctaccagcaggactgcctcgctgccccacctcccgctccttggcctgtccccagattccttccctggttgacttgactcatgcttgtttcactttcacatggaatttcccagttatgaaattaataaaaatcaatggtttccacatctctcagtgcctctatctggaggccaggtagggctggccttgggggagggggaggccagaatgactccaagagctacaggaaggcaggtcagagaccccactggacaaacagtggctggactctgcaccataacacacaatcaacaggggagtgagctggatcc

SEQ ID NO: 997 - DNA, 5784 bp, Homo sapiens
acggcatccagtacagaggggctggacttggacccctgcagcagccctgcacaggagaagcggcatataaagccgcgctgcccgggagccgctcggccacgtccaccggagcatcctgcactgcagggccggtctctcgctccagcagagcctgcgcctttctgactcggtccggaacactgaaaccagtcatcactgcatctttttggcaaaccaggagctcagctgcaggaggcaggatggtctggaggctggtcctgctggctctgtgggtgtggcccagcacgcaagctggtcaccaggacaaagacacgaccttcgaccttttcagtatcagcaacatcaaccgcaagaccattggcgccaagcagttccgcgggcccgaccccggcgtgccggcttaccgcttcgtgcgctttgactacatcccaccggtgaacgcagatgacctcagcaagatcaccaagatcatgcggcagaaggagggcttcttcctcacggcccagctcaagcaggacggcaagtccaggggcacgctgttggctctggagggccccggtctctcccagaggcagttcgagatcgtctccaacggccccgcggacacgctggatctcacctactggattgacggcacccggcatgtggtctccctggaggacgtcggcctggctgactcgcagtggaagaacgtcaccgtgcaggtggctggcgagacctacagcttgcacgtgggctgcgacctcataggaccagttgctctggacgagcccttctacgagcacctgcaggcggaaaagagccggatgtacgtggccaaaggctctgccagagagagtcacttcaggggtttgcttcagaacgtccacctagtgtttgaaaactctgtggaagatattctaagcaagaagggttgccagcaaggccagggagctgagatcaacgccatcagtgagaacacagagacgctgcgcctgggtccgcatgtcaccaccgagtacgtgggccccagctcggagaggaggcccgaggtgtgcgaacgctcgtgcgaggagctgggaaacatggtccaggagctctcggggctccacgtcctcgtgaaccagctcagcgagaacctcaagagagtgtcgaatgataaccagtttctctgggagctcattggtggccctcctaagacaaggaacatgtcagcttgctggcaggatggccggttctttgcggaaaatgaaacgtgggtggtggacagctgcaccacgtgtacctgcaagaaatttaaaaccatttgccaccaaatcacctgcccgcctgcaacctgcgccagtccatcctttgtggaaggcgaatgctgcccttcctgcctccactcggtggacggtgaggagggctggtctccgtgggcagagtggacccagtgctccgtgacgtgtggctctgggacccagcagagaggccggtcctgtgacgtcaccagcaacacctgcttggggccctcgatccagacacgggcttgcagtctgagcaagtgtgacacccgcatccggcaggacggcggctggagccactggtcaccttggtcttcatgctctgtgacctgtggagttggcaatatcacacgcatccgtctctgcaactccccagtgccccagatggggggcaagaattgcaaagggagtggccgggagaccaaagcctgccagggcgccccatgcccaatcgatggccgctggagcccctggtccccgtggtcggcctgcactgtcacctgtgccggtgggatccgggagcgcacccgggtctgcaacagccctgagcctcagtacggagggaaggcctgcgtgggggatgtgcaggagcgtcagatgtgcaacaagaggagctgccccgtggatggctgtttatccaacccctgcttcccgggagcccagtgcagcagcttccccgatgggtcctggtcatgcggcttctgccctgtgggcttcttgggcaatggcacccactgtgaggacctggacgagtgtgccctggtccccgacatctgcttctccaccagcaaggtgcctcgctgtgtcaacactcagcctggcttccactgcctgccctgcccgccccgatacagagggaaccagcccgtcggggtcggcctggaagcagccaagacggaaaagcaagtgtgtgagcccgaaaacccatgcaaggacaagacacacaactgccacaagcacgcggagtgcatctacctgggtcacttcagcgaccccatgtacaagtgcgagtgccagacaggctacgcgggcgacgggctcatctgcggggaggactcggacctggacggctggcccaacctcaatctggtctgcgccaccaacgccacctaccactgcatcaaggataactgcccccatctgccaaattctgggcaggaagactttgacaaggacgggattggcgatgcctgtgatgatgacgatgacaatgacggtgtgaccgatgagaaggacaactgccagctcctcttcaatccccgccaggctgactatgacaaggatgaggttggggaccgctgtgacaactgcccttacgtgcacaaccctgcccagatcgacacagacaacaatggagagggtgacgcctgctccgtggacattgatggggacgatgtcttcaatgaacgagacaattgtccctacgtctacaacactgaccagagggacacggatggtgacggtgtgggggatcactgtgacaactgccccctggtgcacaaccctgaccagaccgacgtggacaatgaccttgttggggaccagtgtgacaacaacgaggacatagatgacgacggccaccagaacaaccaggacaactgcccctacatctccaacgccaaccaggctgaccatgacagagacggccagggcgacgcctgtgaccctgatgatgacaacgatggcgtccccgatgacagggacaactgccggcttgtgttcaacccagaccaggaggacttggacggtgatggacggggtgatatttgtaaagatgattttgacaatgacaacatcccagatattgatgatgtgtgtcctgaaaacaatgccatcagtgagacagacttcaggaacttccagatggtccccttggatcccaaagggaccacccaaattgatcccaactgggtcattcgccatcaaggcaaggagctggttcagacagccaactcggaccccggcatcgctgtaggttttgacgagtttgggtctgtggacttcagtggcacattctacgtaaacactgaccgggacgacgactatgctggcttcgtctttggttaccagtcaagcagccgcttctatgtggtgatgtggaagcaggtgacgcagacctactgggaggaccagcccacgcgggcctatggctactccggcgtgtccctcaaggtggtgaactccaccacggggacgggcgagcacctgaggaacgcgctgtggcacacggggaacacgccggggcaggtgcgaaccttatggcacgaccccaggaacattggctggaaggactacacggcctataggtggcacctgactcacaggcccaagaccggctacatcagagtcttagtgcatgaaggaaaacaggtcatggcagactcaggacctatctatgaccaaacctacgctggcgggcggctgggtctatttgtcttctctcaagaaatggtctatttctcagacctcaagtacgaatgcagagatatttaaacaagatttgctgcatttccggcaatgccctgtgcatgccatggtccctagacacctcagttcattgtggtccttgcggcttctctctctagcagcacctcctgtcccttgaccttaactctgatggttcttcacctcctgccagcaaccccaaacccaagtgccttcagaggataaatatcaatggaactcagagatgaacatctaacccactagaggaaaccagtttggtgatatatgagactttatgtggagtgaaaattgggcatgccattacattgctttttcttgtttgtttaaaaagaatgacgtttacatataaaatgtaattacttattgtatttatgtgtatatggagttgaagggaatactgtgcataagccattatgataaattaagcatgaaaaatattgctgaactacttttggtgcttaaagttgtcactattcttgaattagagttgctctacaatgacacacaaatcccgctaaataaattataaacaagggtcaattcaaatttgaagtaatgttttagtaaggagagattagaagacaacaggcatagcaaatgacataagctaccgattaactaatcggaacatgtaaaacagttacaaaaataaacgaactctcctcttgtcctacaatgaaagccctcatgtgcagtagagatgcagtttcatcaaagaacaaacatccttgcaaatgggtgtgacgcggttccagatgtggatttggcaaaacctcatttaagtaaaaggttagcagagcaaagtgcggtgctttagctgctgcttgtgccgttgtggcgtcggggaggctcctgcctgagcttccttccccagctttgctgcctgagaggaaccagagcagacgcacaggccggaaaaggcgcatctaacgcgtatctaggctttggtaactgcggacaagttgcttttacctgatttgatgatacatttcattaaggttccagttataaatattttgttaatatttattaagtgactatagaatgcaactccatttaccagtaacttattttaaatatgcctagtaacacatatgtagtataatttctagaaacaaacatctaataagtatataatcctgtgaaaatatgaggcttgataatattaggttgtcacgatgaagcatgctagaagctgtaacagaatacatagagaataatgaggagtttatgatggaaccttaatatataatgttgccagcgattttagttcaatatttgttactgttatctatctgctgtatatggaattcttttaattcaaacgctgaaaacgaatcagcatttagtcttgccaggcacacccaataatcagtcatgtgtaatatgcacaagtttgtttttgtttttgttttttttgttggttggtttttttgctttaagttgcatgatctttctgcaggaaatagtcactcatcccactccacataaggggtttagtaagagaagtctgtctgtctgatgatggatagggggcaaatctttttcccctttctgttaatagtcatcacatttctatgccaaacaggaacgatccataactttagtcttaatgtacacattgcattttgataaaattaattttgttgtttcctttgaggttgatcgttgtgttgttttgctgcactttttacttttttgcgtgtggagctgtattcccgagacaacgaagcgttgggatacttcattaaatgtagcgactgtcaacagcgtgcaggttttctgtttctgtgttgtggggtcaaccgtacaatggtgtgggaatgacgatgatgtgaatatttagaatgtaccatattttttgtaaattatttatgtttttctaaacaaatttatcgtataggttgatgaaacgtcatgtgttttgccaaagactgtaaatatttatttatgtgttcacatggtcaaaatttcaccactgaaaccctgcacttagctagaacctcatttttaaagattaacaacaggaaataaattgtaaaaaaggttttct

SEQ ID NO: 998 - DNA, 2388 bp, Homo sapiens
tcctgccccaggcccagcttctctcctgccttccaacgccatggggagcaatctcagcccccaactctgcctgatgccctttatcttgggcctcttgtctggaggtgtgaccaccactccatggtctttggcccagccccagggatcctgctctctggagggggtagagatcaaaggcggctccttccgacttctccaagagggccaggcactggagtacgtgtgtccttctggcttctacccgtaccctgtgcagacacgtacctgcagatctacggggtcctggagcaccctgaagactcaagaccaaaagactgtcaggaaggcagagtgcagagcaatccactgtccaagaccacacgacttcgagaacggggaatactggccccggtctccctactacaatgtgagtgatgagatctctttccactgctatgacggttacactctccggggctctgccaatcgcacctgccaagtgaatggccggtggagtgggcagacagcgatctgtgacaacggagcggggtactgctccaacccgggcatccccattggcacaaggaaggtgggcagccagtaccgccttgaagacagcgtcacctaccactgcagccgggggcttaccctgcgtggctcccagcggcgaacgtgtcaggaaggtggctcttggagcgggacggagccttcctgccaagactccttcatgtacgacacccctcaagaggtggccgaagctttcctgtcttccctgacagagaccatagaaggagtcgatgctgaggatgggcacggcccaggggaacaacagaagcggaagatcgtcctggacccttcaggctccatgaacatctacctggtgctagatggatcagacagcattggggccagcaacttcacaggagccaaaaagtgtctagtcaacttaattgagaaggtggcaagttatggtgtgaagccaagatatggtctagtgacatatgccacataccccaaaatttgggtcaaagtgtctgaagcagacagcagtaatgcagactgggtcacgaagcagctcaatgaaatcaattatgaagaccacaagttgaagtcagggactaacaccaagaaggccctccaggcagtgtacagcatgatgagctggccagatgacgtccctcctgaaggctggaaccgcacccgccatgtcatcatcctcatgactgatggattgcacaacatgggcggggacccaattactgtcattgatgagatccgggacttgctatacattggcaaggatcgcaaaaacccaagggaggattatctggatgtctatgtgtttggggtcgggcctttggtgaaccaagtgaacatcaatgctttggcttccaagaaagacaatgagcaacatgtgttcaaagtcaaggatatggaaaacctggaagatgttttctaccaaatgatcgatgaaagccagtctctgagtctctgtggcatggtttgggaacacaggaagggtaccgattaccacaagcaaccatggcaggccaagatctcagtcattcgcccttcaaagggacacgagagctgtatgggggctgtggtgtctgagtactttgtgctgacagcagcacattgtttcactgtggatgacaaggaacactcaatcaaggtcagcgtaggaggggagaagcgggacctggagatagaagtagtcctatttcaccccaactacaacattaatgggaaaaaagaagcaggaattcctgaattttatgactatgacgttgccctgatcaagctcaagaataagctgaaatatggccagactatcaggcccatttgtctcccctgcaccgagggaacaactcgagctttgaggcttcctccaactaccacttgccagcaacaaaaggaagagctgctccctgcacaggatatcaaagctctgtttgtgtctgaggaggagaaaaagctgactcggaaggaggtctacatcaagaatggggataagaaaggcagctgtgagagagatgctcaatatgccccaggctatgacaaagtcaaggacatctcagaggtggtcacccctcggttcctttgtactggaggagtgagtccctatgctgaccccaatacttgcagaggtgattctggcggccccttgatagttcacaagagaagtcgtttcattcaagttggtgtaatcagctggggagtagtggatgtctgcaaaaaccagaagcggcaaaagcaggtacctgctcacgcccgagactttcacatcaacctctttcaagtgctgccctggctgaaggagaaactccaagatgaggatttgggttttctataaggggtttcctgctggacaggggcgtgggattgaattaaaacagctgcgacaac

SEQ ID NO: 999 - DNA, 2167 bp, Homo sapiens; identical to SEQ ID NO: 437

SEQ ID NO: 1000 - DNA, 492 bp, Homo sapiens
tggtatagctcatgagtctcacacccaggtgaattccctagtgctataggatttgattcatttatggtctcccattatttatactgtatttgtttttcattgattttattctttgcagtcggatacttctggagactatgaaatcacactcttaaaaatctgtggtggagatgactgaaccaagaagataatctccaaaggtccacgatgggcttttccaacagctccaccttacttcttctcatactatttaagagaacaagcaaatataaacagcaacttgtgttcctaacaggaattttcattgttctataacaacaacaacaaaagcgattattattttagagcatctcatttataatgtagcagctcataaatgaaattgaaaatggtattaaagatctgcaactactatccaacttatatttctgctttcaaagttaagaatctttatagttctactccattaaatataaagcaagataataaaac

SEQ ID NO: 1001 - DNA, 1778 bp, Homo sapiens; identical to SEQ ID NO: 439

SEQ ID NO: 1002 - DNA, 2519 bp, Homo sapiens
agtcccgcccctgcgtgcggcgcttctcccaggccccaccttccatccagtgccctggaccctcggctgggtagcgccaccagagcgaccaaacgtcccgcgccttccaggccgcactccagagccaaaagagctccatggcggcggcggccaagcccaacaacctttccctggtggtgcacggaccgggggacttgcgcctggagaactatcctatccctgaaccaggcccaaatgaggtcttgctgaggatgcattctgttggaatctgtggctcagatgtccactactgggagtatggtcgaattgggaattttattgtgaaaaagcccatggtgctgggacatgaagcttcgggaacagtcgaaaaagtgggatcatcggtaaagcacctaaaaccaggtgatcgtgttgccatcgagcctggtgctccccgagaaaatgatgaattctgcaagatgggccgatacaatctgtcaccttccatcttcttctgtgccacgccccccgatgacgggaacctctgccggttctataagcacaatgcagccttttgttacaagcttcctgacaatgtcacctttgaggaaggcgccctgatcgagccactttctgtggggatccatgcctgcaggagaggcggagttaccctgggacacaaggtccttgtgtgtggagctgggccaatcgggatggtcactttgctcgtggccaaagcaatgggagcagctcaagtagtggtgactgatctgtctgctacccgattgtccaaagccaaggagattggggctgatttagtcctccagatctccaaggagagccctcaggaaatcgccaggaaagtagaaggtctgctggggtgcaagccggaagtcaccatcgagtgcacgggggcagaggcctccatccaggcgggcatctacgccactcgctctggtgggaccctcgtgcttgtggggctgggctctgagatgaccaccgtacccctactgcatgcagccatccgggaggtggatatcaagggcgtgtttcgatactgcaacacgtggccagtggcgatttcgatgcttgcgtccaagtctgtgaatgtaaaacccctcgtcacccataggtttcctctggagaaagctctggaggcctttgaaacatttaaaaagggattggggttgaaaatcatgctcaagtgtgaccccagtgaccagaatccctgatgttaatgggctctgctcatccccacagtctcgggatctcagggcacaatggctggacaggggtgggctctgatgcagaactttctcttttgaatgttaagaataactaatacaattcattgtgaacagaagtccttaagcagaggaattggtgtgccttaaagatacaatctgggatagtttgggggaacttgtagccagaatgccctgttcatgctgagcaaagttcagcaagtagagcagagtttggcaggcaggtgccaggaactccccttcttcctggagtgccttcattgaggaaggaaatctggcccttgggtttcctggttccactgctactgacccagaggggaatgagggctgagttatgaaaagataacttcatgaagacttaactggcccagaagctgattttcatgaaaatctgccactcagggtctgggatgaaggcttgtcagcacttccagtttagaacgcaatgtttctagagacatattggctgtttgttttgatgataaaaggagaataagaaaaggcatcactttcctggatccaggataatttttaaaccaatcaaatgaaaaaaacaaacaaacaaaaaaggaaatgtcatgtgaggttaaaccagtttgcattcccctaatgtggaaaaagtaagaggactactcagcactgtttgaagattgcctcttctacagcttctgagaattgtgttatttcacttgccaagtgaaggaccccctccccaacatgccccagcccacccctaagcatggtcccttgtcaccaggcaaccaggaaactgctacttgtggacctcaccagagaccaggagggtttggttagctcacaggacttcccccaccccagaagattagcatcccatactagactcatactcaactcaactaggctcatactcaattgatggttattagacaattccatttctttctggttattataaacagaaaatctttcctcttctcattaccagtaaaggctcttggtatctttctgttggaatgatttctatgaacttgtcttattttaatggtgggttttttttctggtaagatttagacctaaatcgcatcatgccaacttgtgactttgagactattcatcaagaatgaggatatagtagccatgacatagcttgagctatagcctttaattccttactttggctatgggtggagggtgagtttgaagaggttctgattttcttgtaacctgggaaagccatgaccttgtgcccgattctttcagattgctttgggtaataaatattggtggtggtatctg

SEQ ID NO: 1003 - DNA, 3590 bp, Homo sapiens
cgcggacccggccggcccaggcccgcgcccgccgcggccctgagaggccccggcaggtcccggcccggcggcggcagccatggccggggggccgggcccgggggagcccgcagcccccggcgcccagcacttcttgtacgaggtgccgccctgggtcatgtgccgcttctacaaagtgatggacgccctggagcccgccgactggtgccagttcgccgccctgatcgtgcgcgaccagaccgagctgcggctgtgcgagcgctccgggcagcgcacggccagcgtcctgtggccctggatcaaccgcaacgcccgtgtggccgacctcgtgcacatcctcacgcacctgcagctgctccgtgcgcgggacatcatcacagcctggcaccctcccgccccgcttccgtccccaggcaccactgccccgaggcccagcagcatccctgcacccgccgaggccgaggcctggagcccccggaagttgccatcctcagcctccaccttcctctccccagcttttccaggctcccagacccattcagggcctgagctcggcctggttccaagccctgcttccctgtggcctccaccgccatctccagccccttcttctaccaagccaggcccagagagctcagtgtccctcctgcagggagcccgcccctctccgttttgctggcccctctgtgagatttcccggggcacccacaacttctcggaggagctcaagatcggggagggtggctttgggtgcgtgtaccgggcggtgatgaggaacacggtgtatgctgtgaagaggctgaaggagaacgctgacctggagtggactgcagtgaagcagagcttcctgaccgaggtggagcagctgtccaggtttcgtcacccaaacattgtggactttgctggctactgtgctcagaacggcttctactgcctggtgtacggcttcctgcccaacggctccctggaggaccgtctccactgccagacccaggcctgcccacctctctcctggcctcagcgactggacatccttctgggtacagcccgggcaattcagtttctacatcaggacagccccagcctcatccatggagacatcaagagttccaacgtccttctggatgagaggctgacacccaagctgggagactttggcctggcccggttcagccgctttgccgggtccagccccagccagagcagcatggtggcccggacacagacagtgcggggcaccctggcctacctgcccgaggagtacatcaagacgggaaggctggctgtggacacggacaccttcagctttggggtggtagtgctagagaccttggctggtcagagggctgtgaagacgcacggtgccaggaccaagtatctgaaagacctggtggaagaggaggctgaggaggctggagtggctttgagaagcacccagagcacactgcaagcaggtctggctgcagatgcctgggctgctcccatcgccatgcagatctacaagaagcacctggaccccaggcccgggccctgcccacctgagctgggcctgggcctgggccagctggcctgctgctgcctgcaccgccgggccaaaaggaggcctcctatgacccaggtgtacgagaggctagagaagctgcaggcagtggtggcgggggtgcccgggcatttggaggccgccagctgcatccccccttccccgcaggagaactcctacgtgtccagcactggcagagcccacagtggggctgctccatggcagcccctggcagcgccatcaggagccagtgcccaggcagcagagcagctgcagagaggccccaaccagcccgtggagagtgacgagagcctaggcggcctctctgctgccctgcgctcctggcacttgactccaagctgccctctggacccagcacccctcagggaggccggctgtcctcagggggacacggcaggagaatcgagctgggggagtggcccaggatcccggcccacagccgtggaaggactggcccttggcagctctgcatcatcgtcgtcagagccaccgcagattatcatcaaccctgcccgacagaagatggtccagaagctggccctgtacgaggatggggccctggacagcctgcagctgctgtcgtccagctccctcccaggcttgggcctggaacaggacaggcaggggcccgaagaaagtgatgaatttcagagctgatgtgttcacctgggcagatcccccaaatccggaagtcaaagttctcatggtcagaagttctcatggtgcacgagtcctcagcactctgccggcagtgggggtgggggcccatgcccgcgggggagagaaggaggtggccctgctgttctaggctctgtgggcataggcaggcagagtggaaccctgcctccatgccagcatctgggggcaaggaaggctggcatcatccagtgaggaggctggcgcatgttgggaggctgctggctgcacagacccgtgaggggaggagaggggctgctgtgcaggggtgtggagtagggagctggctcccctgagagccatgcagggcgtctgcagcccaggcctctggcagcagctctttgcccatctctttggacagtggccaccctgcacaatggggccgacgaggcctagggccctcctacctgcttacaatttggaaaagtgtggccgggtgcggtggctcacgcctgtaatcccagcactttgggaggccaaggcaggaggatcgctggagcccagtaggtcaagaccagccagggcaacatgatgagaccctgtctctgccaaaaaattttttaaactattagcctggcgtggtagcgcacgcctgtggtcccagctgctggggaggctgaagtaggaggatcatttatgcttgggaggtcgaggctgcagtgagtcatgattgtatgactgcactccagcctgggtgacagagcaagaccctgtttcaaaaagaaaaaccctgggaaaagtgaagtatggctgtaagtctcatggttcagtcctagcaagaagcgagaattctgagatcctccagaaagtcgagcagcacccacctccaacctcgggccagtgtcttcaggctttactggggacctgcgagctggcctaatgtggtggcctgcaagccaggccatccctgggcgccacagacgagctccgagccaggtcaggcttcggaggccacaagctcagcctcaggcccaggcactgattgtggcagaggggccactacccaaggtctagctaggcccaagacctagttacccagacagtgagaagcccctggaaggcagaaaagttgggagcatggcagacagggaagggaaacattttcagggaaaagacatgtatcacatgtcttcagaagcaagtcaggtttcatgtaaccgagtgtcctcttgcgtgtccaaaagtagcccagggctgtagcacaggcttcacagtgattttgtgttcagccgtgagtcacactacatgcccccgtgaagctgggcattggtgacgtccaggttgtccttgagtaataaaaacgtatgttccctaaaaaaaaaaaaaggaattc

SEQ ID NO: 1004 - DNA, 2826 bp, Homo sapiens
ccggttaggggccgccatcccctcagagcgtcgggatatcgggtggcggctcgggacggaggacgcgctagtgttcttctgtgtggcagttcagaatgatggatcaagctagatcagcattctctaacttgtttggtggagaaccattgtcatatacccggttcagcctggctcggcaagtagatggcgataacagtcatgtggagatgaaacttgctgtagatgaagaagaaaatgctgacaataacacaaaggccaatgtcacaaaaccaaaaaggtgtagtggaagtatctgctatgggactattgctgtgatcgtctttttcttgattggatttatgattggctacttgggctattgtaaaggggtagaaccaaaaactgagtgtgagagactggcaggaaccgagtctccagtgagggaggagccaggagaggacttccctgcagcacgtcgcttatattgggatgacctgaagagaaagttgtcggagaaactggacagcacagacttcaccagcaccatcaagctgctgaatgaaaattcatatgtccctcgtgaggctggatctcaaaaagatgaaaatcttgcgttgtatgttgaaaatcaatttcgtgaatttaaactcagcaaagtctggcgtgatcaacattttgttaagattcaggtcaaagacagcgctcaaaactcggtgatcatagttgataagaacggtagacttgtttacctggtggagaatcctgggggttatgtggcgtatagtaaggctgcaacagttactggtaaactggtccatgctaattttggtactaaaaaagattttgaggatttatacactcctgtgaatggatctatagtgattgtcagagcagggaaaatcacgtttgcagaaaaggttgcaaatgctgaaagcttaaatgcaattggtgtgttgatatacatggaccagactaaatttcccattgttaacgcagaactttcattctttggacatgctcatctggggacaggtgacccttacacacctggattcccttccttcaatcacactcagtttccaccatctcggtcatcaggattgcctaatatacctgtccagacaatctccagagctgctgcagaaaagctgtttgggaatatggaaggagactgtccctctgactggaaaacagactctacatgtaggatggtaacctcagaaagcaagaatgtgaagctcactgtgagcaatgtgctgaaagagataaaaattcttaacatctttggagttattaaaggctttgtagaaccagatcactatgttgtagttggggcccagagagatgcatggggccctggagctgcaaaatccggtgtaggcacagctctcctattgaaacttgcccagatgttctcagatatggtcttaaaagatgggtttcagcccagcagaagcattatctttgccagttggagtgctggagactttggatcggttggtgccactgaatggctagagggatacctttcgtccctgcatttaaaggctttcacttatattaatctggataaagcggttcttggtaccagcaacttcaaggtttctgccagcccactgttgtatacgcttattgagaaaacaatgcaaaatgtgaagcatccggttactgggcaatttctatatcaggacagcaactgggccagcaaagttgagaaactcactttagacaatgctgctttccctttccttgcatattctggaatcccagcagtttctttctgtttttgcgaggacacagattatccttatttgggtaccaccatggacacctataaggaactgattgagaggattcctgagttgaacaaagtggcacgagcagctgcagaggtcgctggtcagttcgtgattaaactaacccatgatgttgaattgaacctggactatgagaggtacaacagccaactgctttcatttgtgagggatctgaaccaatacagagcagacataaaggaaatgggcctgagtttacagtggctgtattctgctcgtggagacttcttccgtgctacttccagactaacaacagatttcgggaatgctgagaaaacagacagatttgtcatgaagaaactcaatgatcgtgtcatgagagtggagtatcacttcctctctccctacgtatctccaaaagagtctcctttccgacatgtcttctggggctccggctctcacacgctgccagctttactggagaacttgaaactgcgtaaacaaaataacggtgcttttaatgaaacgctgttcagaaaccagttggctctagctacttggactattcagggagctgcaaatgccctctctggtgacgtttgggacattgacaatgagttttaaatgtgatacccatagcttccatgagaacagcagggtagtctggtttctagacttgtgctgatcgtgctaaattttcagtaggcctacaaaacctgatgttaaaattccatcccatcatcttggtactactagatgtctttaggcagcagcttttaatacagggtagataacctgtacttcaagttaaagtgaataaccacttaaaaaatgtccatgatggaatattcccctatctctagaattttaagtgctttgtaatgggaactgcctctttcctgttgttgttaatgaaaatgtcagaaaccagttatgtgaatgatctctctgaatcctaagggctggtctctgctgaaggttgtaagtggtcgcttactttgagtgatcctccaacttcatttgatgctaaataggagataccaggttgaaagaccttctccaaatgagatct

SEQ ID NO: 1005 - DNA, 2826 bp, Homo sapiens; identical to SEQ ID NO: 1004

SEQ ID NO: 1006 - DNA, 2826 bp, Homo sapiens; identical to SEQ ID NO: 1004

SEQ ID NO: 1007 - DNA, 1317 bp, Homo sapiens
acagctgctcttggggatatcatggggcactatgatgaaagcatgccagatccacttcctgagtttactgaagatcaggcggctcctgatgacaaaaacaaaacggacccaggggttcatgctaccctgaagtcactcagtagtcagattgaaaccatgcgcagccccgatggctcgaaaaagcacccagcccgcacgtgtgatgacctaaagctttgccattccgcaaagcagagtggtgaatactggattgatcctaaccaaggatctgttgaagatgccatcaaagtttactgcaacatggaaacaggagaaacatgtatttcagcaaacccatccagtgtaccacgtaaaacctggtgggccagtaaatctcctgacaataaacctgtttggtatggtcttgatatgaacagagggtctcagttcgcttatggagaccaccaatcacctaatacagccattactcagatgacttttttgcgccttttatcaaaagaagcctcccagaacatcacttacatctgtaaaaacagtgtaggatacatggacgatcaagctaagaacctcaaaacagctgtggttctcaaaggggcaaatgacttagatatcaaagcagagggaaatattagatcccggtatatcgttcttcaagacacttgctctaagcggaatggaaatgtgggcaagactgtctttgaatatagaacacagaatgtggcacgcttgcccatcatagatcttgctcctgtggatgttggcggcacagaccaggaattcggcgttgaaattgggccagtttgttttgtgtaaagtaagccaagacacatcgacaatgagcaccaccatcaatgaccaccgccattcacaagaactttgactgtttgaagttgatcctgagactcttgaagtaatggctgatcctgcatcagcattgtatatatggtcttaagtgcctggcctccttatccttcagaatatttattttacttacaatcctcaagttttaattgattttaaatatttttcaatacaacagtttaggtttaagatgaccaatgacaatgaccacctttgcagaaagtaaactgattgaataaataaatctccgttttcttcaatttatttcagtgtaatgaaaaagttgcttagtatttatgaggaaattcttcttcctggcaggtagcttaaagagtggggtatacagagccacaacacatgtttattttacaaaagctgcagttgaaaaatagaaattagtgcccttttgtgacctctcattccaagattgtcaattaaaaatgagtttaaaatgtt

SEQ ID NO: 1008 - DNA, 1452 bp, Homo sapiens
ttggtttctgctgggtgtaggtccttggctggtcgggctccggtgttctgcttctccccgctgagctgctgcctggtgaagaggaagccatggcgctccgagtcaccaggaactcgaaaattaatgctgaaaataaggcgaagatcaacatggcaggcgcaaagcgcgttcctacggcccctgctgcaacctccaagcccggactgaggccaagaacagctcttggggacattggtaacaaagtcagtgaacaactgcaggccaaaatgcctatgaagaaggaagcaaaaccttcagctactggaaaagtcattgataaaaaactaccaaaacctcttgaaaaggtacctatgctggtgccagtgccagtgtctgagccagtgccagagccagaacctgagccagaacctgagcctgttaaagaagaaaaactttcgcctgagcctattttggttgatactgcctctccaagcccaatggaaacatctggatgtgcccctgcagaagaagacctgtgtcaggctttctctgatgtaattcttgcagtaaatgatgtggatgcagaagatggagctgatccaaacctttgtagtgaatatgtgaaagatatttatgcttatctgagacaacttgaggaagagcaagcagtcagaccaaaatacctactgggtcgggaagtcactggaaacatgagagccatcctaattgactggctagtacaggttcaaatgaaattcaggttgttgcaggagaccatgtacatgactgtctccattattgatcggttcatgcagaataattgtgtgcccaagaagatgctgcagctggttggtgtcactgccatgtttattgcaagcaaatatgaagaaatgtaccctccagaaattggtgactttgcttttgtgactgacaacacttatactaagcaccaaatcagacagatggaaatgaagattctaagagctttaaactttggtctgggtcggcctctacctttgcacttccttcggagagcatctaagattggagaggttgatgtcgagcaacatactttggccaaatacctgatggaactaactatgttggactatgacatggtgcactttcctccttctcaaattgcagcaggagctttttgcttagcactgaaaattctggataatggtgaatggacaccaactctacaacattacctgtcatatactgaagaatctcttcttccagttatgcagcacctggctaagaatgtagtcatggtaaatcaaggacttacaaagcacatgactgtcaagaacaagtatgccacatcgaagcatgctaagatcagcactctaccacagctgaattctgcactagttcaagatttagccaaggctgtggcaaaggtgtaacttgtaaacttgagttggagtactatactttacaaactaaaattggcacatgtgcatctgt

SEQ ID NO: 1009 - DNA, 2691 bp, Homo sapiens
gcttgcccgtcggtcgctagctcgctcggtgcgcgtcgtcccgctccatggcgctcttcgtgcggctgctggctctcgccctggctctggccctgggccccgccgcgaccctggcgggtcccgccaagtcgccctaccagctggtgctgcagcacagcaggctccggggccgccagcacggccccaacgtgtgtgctgtgcagaaggttattggcactaataggaagtacttcaccaactgcaagcagtggtaccaaaggaaaatctgtggcaaatcaacagtcatcagctacgagtgctgtcctggatatgaaaaggtccctggggagaagggctgtccagcagccctaccactctcaaacctttacgagaccctgggagtcgttggatccaccaccactcagctgtacacggaccgcacggagaagctgaggcctgagatggaggggcccggcagcttcaccatcttcgcccctagcaacgaggcctgggcctccttgccagctgaagtgctggactccctggtcagcaatgtcaacattgagctgctcaatgccctccgctaccatatggtgggcaggcgagtcctgactgatgagctgaaacacggcatgaccctcacctctatgtaccagaattccaacatccagatccaccactatcctaatgggattgtaactgtgaactgtgcccggctcctgaaagccgaccaccatgcaaccaacggggtggtgcacctcatcgataaggtcatctccaccatcaccaacaacatccagcagatcattgagatcgaggacacctttgagacccttcgggctgctgtggctgcatcagggctcaacacgatgcttgaaggtaacggccagtacacgcttttggccccgaccaatgaggccttcgagaagatccctagtgagactttgaaccgtatcctgggcgacccagaagccctgagagacctgctgaacaaccacatcttgaagtcagctatgtgtgctgaagccatcgttgcggggctgtctgtagagaccctggagggcacgacactggaggtgggctgcagcggggacatgctcactatcaacgggaaggcgatcatctccaataaagacatcctagccaccaacggggtgatccactacattgatgagctactcatcccagactcagccaagacactatttgaattggctgcagagtctgatgtgtccacagccattgaccttttcagacaagccggcctcggcaatcatctctctggaagtgagcggttgaccctcctggctcccctgaattctgtattcaaagatggaacccctccaattgatgcccatacaaggaatttgcttcggaaccacataattaaagaccagctggcctctaagtatctgtaccatggacagaccctggaaactctgggcggcaaaaaactgagagtttttgtttatcgtaatagcctctgcattgagaacagctgcatcgcggcccacgacaagagggggaggtacgggaccctgttcacgatggaccgggtgctgacccccccaatggggactgtcatggatgtcctgaagggagacaatcgctttagcatgctggtagctgccatccagtctgcaggactgacggagaccctcaaccgggaaggagtctacacagtctttgctcccacaaatgaagccttccgagccctgccaccaagagaacggagcagactcttgggagatgccaaggaacttgccaacatcctgaaataccacattggtgatgaaatcctggttagcggaggcatcggggccctggtgcggctaaagtctctccaaggtgacaagctggaagtcagcttgaaaaacaatgtggtgagtgtcaacaaggagcctgttgccgagcctgacatcatggccacaaatggcgtggtccatgtcatcaccaatgttctgcagcctccagccaacagacctcaggaaagaggggatgaacttgcagactctgcgcttgagatcttcaaacaagcatcagcgttttccagggcttcccagaggtctgtgcgactagcccctgtctatcaaaagttattagagaggatgaagcattagcttgaagcactacaggaggaatgcaccacggcagctctccgccaatttctctcagatttccacagagactgtttgaatgttttcaaaaccaagtatcacactttaatgtacatgggccgcaccataatgagatgtgagccttgtgcatgtgggggaggagggagagagatgtactttttaaatcatgttccccctaaacatggctgttaacccactgcatgcagaaacttggatgtcactgcctgacattcacttccagagaggacctatcccaaatgtggaattgactgcctatgccaagtccctggaaaaggagcttcagtattgtggggctcataaaacatgaatcaagcaatccagcctcatgggaagtcctggcacagtttttgtaaagcccttgcacagctggagaaatggcatcattataagctatgagttgaaatgttctgtcaaatgtgtctcacatctacacgtggcttggaggcttttatggggccctgtccaggtagaaaagaaatggtatgtagagcttagatttccctattgtgacagagccatggtgtgtttgtaataataaaaccaaagaaacata

SEQ ID NO: 1010 - DNA, 1599 bp, Homo sapiens
tctaaagaagcccctgggagcacagctcatcaccatggactggacctggaggttcctctttgtggtggcagcagctacaggtgtccagtcccagatgcaggtggtgcagtctggggctgaagtaaagaagcctgggtcctcggtgacggtctcctgcaaggcatctggaggcaccttcagcaactatgctatcagctgggtgcgacaggcccctggacaagggcttgagtggatgggagggatcatccctctttttggtacaccaacctactcacagaacttccagggcagagtcacgattaccgcggacaaatccaccagcacagcccacatggagctgatcagcctgagatctgaggacacggccgtgtattactgtgcgacagatcgctacaggcaggcaaattttgaccgggcccgggttggctggttcgacccctggggccagggcaccctggtcaccgtctcctcagcctccaccaagggcccatcggtcttccccctggcaccctcctccaagagcacctctgggggcacagcggccctgggctgcctggtcaaggactacttccccgaaccggtgacggtgtcgtggaactcaggcgccctgaccagcggcgtgcacaccttcccggctgtcctacagtcctcaggactctactccctcagcagcgtggtgaccgtgccctccagcagcttgggcacccagacctacatctgcaacgtgaatcacaagcccagcaacaccaaggtggacaagaaagttgagcccaaatcttgtgacaaaactcacacatgcccaccgtgcccagcacctgaactcctggggggaccgtcagtcttcctcttccccccaaaacccaaggacaccctcatgatctcccggacccctgaggtcacatgcgtggtggtggacgtgagccacgaagaccctgaggtcaagttcaactggtacgtggacggcgtggaggtgcataatgccaagacaaagccgcgggaggagcagtacaacagcacgtaccgtgtggtcagcgtcctcaccgtcctgcaccaggactggctgaatggcaaggagtacaagtgcaaggtctccaacaaagccctcccagcccccatcgagaaaaccatctccaaagccaaagggcagccccgagaaccacaggtgtacaccctgcccccatcccgggatgagctgaccaagaaccaggtcagcctgacctgcctggtcaaaggcttctatcccagcgacatcgccgtggagtgggagagcaatgggcagccggagaacaactacaagaccacgcctcccgtgctggactccgacggctccttcttcctctacagcaagctcaccgtggacaagagcaggtggcagcaggggaacgtcttctcatgctccgtgatgcatgaggctctgcacaaccactacacgcagaagagcctctccctgtctccgggtaaatgagtgcgacggccggcaagcccccgctccccgggctctcgcggtcgcacgaggatgcttggcacgtaccccgtgtacatacttcccgggcgcccagcatggaaataaagcacccagcgctgccctgggcccctgcg

SEQ ID NO: 1011 - DNA, 3308 bp, Homo sapiens
ggcggccgcgctcgtcggggccgggggcggggccgatccctccggcttcccgcttcccgcggagaacaacaatgaaagtgaaagaggggtggggcgggggcgagcccgggttctgtggcccatttgccctgtggccttgagcaagcccctcccccaggcctcgggggctctcccggtttgggggaaccgggcgaggcaatgccacaggcccagggttagagggggtgggcacttgcagctgccgatgtggctggatctggaacttctcggagacggctcctgtcagcgccaagtttcaccaaatccaggcctgcccctcctcccccaggacccccactcgcagtccctcaagcctgtgctcccggaaaggcactgggcgaccgcacccgtggctttctctgggcgaccgggtcccagactccccccagcacagcagagcgcttccctgcccaccccggaaaccgccccaggtggccgcgccccctccccagcagccagcagggcgccagggctgagccggccgtggaggggagcgggtcccgcggttatacaggcgccggggctccgcggcaggcaagagaagctgaggcctgagaacggcccaaaccttggcgtacggcaggggacgacctgggatgggggcagcgggcggcggcgcagggagtgggccgggggccggtgtgcgcgggcgggacggggcccggggtcgggagacaccgcttggaagatggggccgggagaggcgccgtcgcagcgcagagggcaccggcggggagacgcgaggacgcggggcccgggaacacggacgccggagtagaagcgcggggggccgggctggagcgggggcggggacgcgggggtcgggggcggtgcgggtttgaggggagggggcgggcgggtccttccctgggggggtggggagagggggcgggggcccatgtgaccggctcagaccgttctggagacaaaaggggccgcggcggccggagcgggacgggcccggcgcgggagggagcgaagcagcgcgggcagcgagcgagtgagcgcgcggcgggcccctggtccgccggcccgcggccgatctaggggctgggggctggaggcggggtgggggtctgagctgcgtcctgggctcgaggcgtcccccgggggagtcgcctcttagcggtgcgtccgggctagcggcgaggggccgccccaagtcttcccaccgccgccaccttagcagcccgacttggggcctggaaagtggagcacgcggaggtgggagggccctgcacgcggccccggtgggaaaggggacgggccagggattcagactcgggctctcccctcaggatgcagcaccgaggcttcctcctcctcaccctcctcgccctactggcgctcacctccgcggtcgccaaaaagaaaggtgatgggggatgatcgaaggagggctggggacgggcaggcaggcccctccacttctggctggccgcctggttcctagcctggaacccaggaaggcggctcccgagggagtctccccgtgccccagtcctgaactctgttcctcgcgcgtgtagataaggtgaagaagggcggcccggggagcgagtgcgctgagtgggcctgggggccctgcacccccagcagcaaggattgcggcgtgggtttccgcgagggcacctgcggggcccagacccagcgcatccggtgcagggtgccctgcaactggaagaaggagtttggaggtaggcgggcgcagtcagagggcagagacgggggcacagcctcgccgaagcctgggcggacccttggcggagggcggggccgcgggcgcgcagcgctgacctgggccgctctctcgccagccgactgcaagtacaagtttgagaactggggtgcgtgtgatgggggcacaggcaccaaagtccgccaaggcaccctgaagaaggcgcgctacaatgctcagtgccaggagaccatccgcgtcaccaagccctgcacccccaagaccaaagcaaaggccaaaggtcagcgaaaggagaagggggtggggctgtcgcggggggctgcccccccccccccgcctgtgaggggacaattccaagttaaaccttaagttttgagtcctggccagtggcttcctgacatcgcctcacttggcttccctgcctggaaaagtctgaagatgggcactacaagagaggccgcaggtgatgctggggacataaatcctccctggcccaaatagggaccaactcaaactactccattggagcatctggcttaggacccagggagagagtcctggaacggcttgcctttggtcagctctccagccacgggcagcatttggtcagctctgccctttctagtgttgggaggaggtcaaggcccaccctgggcctctcagctcactcgtgactcagcccagcgaggccagcagggcaggggtgaatctgcccgcttctcaggtgaggaggctgaggatgcccagggctgctgtgaccaggactaggactggaaacttgaaggttttctgatcccaagtggaaataggaagctggggatgtcccatgtccacatcacaatggctgccccatcccctgcttccgagtcagctgattggaaaccactaggggcagatcttctccttccctgatgcccgggtgtttgtggagccggcggtctgcaatgggtcagcctaactgctgatatggtattaatatttctttcttgttttacagccaagaaagggaagggaaaggactagacgccaagcctggatgccaaggagcccctggtgtcacatggggcctggccacgccctccctctcccaggcccgagatgtgacccaccagtgccttctgtctgctcgttagctttaatcaatcatgccctgccttgtccctctcactccccagccccacccctaagtgcccaaagtggggagggacaagggattctgggaagcttgagcctcccccaaagcaatgtgagtcccagagcccgcttttgttcttccccacaattccattactaagaaacacatcaaataaactgactttttccccccaataaaagctcttcttttttaatataaagccccttcccaaggagtttgctgtggaaatgtgtttgggagtgggaaggtggggagaaagaccaggctgtagggactggtgggtttcagggggcttggtggtgggtgctctccagagctcatggaaaaagcagaacaattacaacatttcttccagggcccctgaaaggtgctccccatcaagtcacctaagcctttcggtcctcatctccctca

SEQ ID NO: 1012 - DNA, 1221 bp, Homo sapiens
cgcaggctggaaggaagacgaacctacgaagcagagatctgaagacagcatgtacacagccattccccagagtggctctccattcccaggctcagtgcaggatccaggcctgcatgtgtggcgggtggagaagctgaagccggtgcctgtggcgcaagagaaccagggcgtcttcttctcgggggactcctacctagtgctgcacaatggcccagaagaggtttcccatctgcacctgtggataggccagcagtcatcccgggatgagcagggggcctgtgccgtgctggctgtgcacctcaacacgctgctgggagagcggcctgtgcagcaccgcgaggtgcagggcaatgagtctgacctcttcatgagctacttcccacggggcctcaagtaccaggaaggtggtgtggagtcagcatttcacaagacctccacaggagccccagctgccatcaagaaactctaccaggtgaaggggaagaagaacatccgtgccaccgagcgggcactgaactgggacagcttcaacactggggactgcttcatcctggacctgggccagaacatcttcgcctggtgtggtggaaagtccaacatcctggaacgcaacaaggcgagggacctggccctggccatccgggacagtgagcgacagggcaaggcccaggtggagattgtcactgatggggaggagcctgctgagatgatccaggtcctgggccccaagcctgctctgaaggagggcaaccctgaggaagacctcacagctgacaaggcaaatgcccaggccgcagctctgtataaggtctctgatgccactggacagatgaacctgaccaaggtggctgactccagcccctttgcccttgaactgctgatatctgatgactgctttgtgctggacaacgggctctgtggcaagatctatatctggaaggggcgaaaagcgaatgagaaggagcggcaggcagccctgcaggtggccgagggcttcatctcgcgcatgcagtacgccccgaacactcaggtggagattctgcctcagggccgtgagagtcccatcttcaagcaatttttcaaggactggaaatgagggtgggcgtcttcctgccccatgctcccctgccccccaccacctgcctgcttgcttctctggctgcctggtcagtgcagaggtgccccctgcagatgttcaataaaggagacaagtgctttccc

SEQ ID NO: 1013 - DNA, 4003 bp, Homo sapiens
attaaacctctcgccgagcccctccgcagactctgcgccggaaagtttcatttgctgtatgccatcctcgagagctgtctaggttaacgttcgcactctgtgtatataacctcgacagtcttggcacctaacgtgctgtgcgtagctgctcctttggttgaatccccaggcccttgttggggcacaaggtggcaggatgtctcagtggtacgaacttcagcagcttgactcaaaattcctggagcaggttcaccagctttatgatgacagttttcccatggaaatcagacagtacctggcacagtggttagaaaagcaagactgggagcacgctgccaatgatgtttcatttgccaccatccgttttcatgacctcctgtcacagctggatgatcaatatagtcgcttttctttggagaataacttcttgctacagcataacataaggaaaagcaagcgtaatcttcaggataattttcaggaagacccaatccagatgtctatgatcatttacagctgtctgaaggaagaaaggaaaattctggaaaacgcccagagatttaatcaggctcagtcggggaatattcagagcacagtgatgttagacaaacagaaagagcttgacagtaaagtcagaaatgtgaaggacaaggttatgtgtatagagcatgaaatcaagagcctggaagatttacaagatgaatatgacttcaaatgcaaaaccttgcagaacagagaacacgagaccaatggtgtggcaaagagtgatcagaaacaagaacagctgttactcaagaagatgtatttaatgcttgacaataagagaaaggaagtagttcacaaaataatagagttgctgaatgtcactgaacttacccagaatgccctgattaatgatgaactagtggagtggaagcggagacagcagagcgcctgtattggggggccgcccaatgcttgcttggatcagctgcagaactggttcactatagttgcggagagtctgcagcaagttcggcagcagcttaaaaagttggaggaattggaacagaaatacacctacgaacatgaccctatcacaaaaaacaaacaagtgttatgggaccgcaccttcagtcttttccagcagctcattcagagctcgtttgtggtggaaagacagccctgcatgccaacgcaccctcagaggccgctggtcttgaagacaggggtccagttcactgtgaagttgagactgttggtgaaattgcaagagctgaattataatttgaaagtcaaagtcttatttgataaagatgtgaatgagagaaatacagtaaaaggatttaggaagttcaacattttgggcacgcacacaaaagtgatgaacatggaggagtccaccaatggcagtctggcggctgaatttcggcacctgcaattgaaagaacagaaaaatgctggcaccagaacgaatgagggtcctctcatcgttactgaagagcttcactcccttagttttgaaacccaattgtgccagcctggtttggtaattgacctcgagacgacctctctgcccgttgtggtgatctccaacgtcagccagctcccgagcggttgggcctccatcctttggtacaacatgctggtggcggaacccaggaatctgtccttcttcctgactccaccatgtgcacgatgggctcagctttcagaagtgctgagttggcagttttcttctgtcaccaaaagaggtctcaatgtggaccagctgaacatgttgggagagaagcttcttggtcctaacgccagccccgatggtctcattccgtggacgaggttttgtaaggaaaatataaatgataaaaattttcccttctggctttggattgaaagcatcctagaactcattaaaaaacacctgctccctctctggaatgatgggtgcatcatgggcttcatcagcaaggagcgagagcgtgccctgttgaaggaccagcagccggggaccttcctgctgcggttcagtgagagctcccgggaaggggccatcacattcacatgggtggagcggtcccagaacggaggcgaacctgacttccatgcggttgaaccctacacgaagaaagaactttctgctgttactttccctgacatcattcgcaattacaaagtcatggctgctgagaatattcctgagaatcccctgaagtatctgtatccaaatattgacaaagaccatgcctttggaaagtattactccaggccaaaggaagcaccagagccaatggaacttgatggccctaaaggaactggatatatcaagactgagttgatttctgtgtctgaagttcacccttctagacttcagaccacagacaacctgctccccatgtctcctgaggagtttgacgaggtgtctcggatagtgggctctgtagaattcgacagtatgatgaacacagtatagagcatgaatttttttcatcttctctggcgacagttttccttctcatctgtgattccctcctgctactctgttccttcacatcctgtgtttctagggaaatgaaagaaaggccagcaaattcgctgcaacctgttgatagcaagtgaatttttctctaactcagaaacatcagttactctgaagggcatcatgcatcttactgaaggtaaaattgaaaggcattctctgaagagtgggtttcacaagtgaaaaacatccagatacacccaaagtatcaggacgagaatgagggtcctttgggaaaggagaagttaagcaacatctagcaaatgttatgcataaagtcagtgcccaactgttataggttgttggataaatcagtggttatttagggaactgcttgacgtaggaacggtaaatttctgtgggagaattcttacatgttttctttgctttaagtgtaactggcagttttccattggtttacctgtgaaatagttcaaagccaagtttatatacaattatatcagtcctctttcaaaggtagccatcatggatctggtagggggaaaatgtgtattttattacatctttcacattggctatttaaagacaaagacaaattctgtttcttgagaagagaatattagctttactgtttgttatggcttaatgacactagctaatatcaatagaaggatgtacatttccaaattcacaagttgtgtttgatatccaaagctgaatacattctgctttcatcttggtcacatacaattatttttacagttctcccaagggagttaggctattcacaaccactcattcaaaagttgaaattaaccatagatgtagataaactcagaaatttaattcatgtttcttaaatgggctactttgtcctttttgttattagggtggtatttagtctattagccacaaaattgggaaaggagtagaaaaagcagtaactgacaacttgaataatacaccagagataatatgagaatcagatcatttcaaaactcatttcctatgtaactgcattgagaactgcatatgtttcgctgatatatgtgtttttcacatttgcgaatggttccattctctctcctgtactttttccagacacttttttgagtggatgatgtttcgtgaagtatactgtatttttacctttttccttccttatcactgacacaaaaagtagattaagagatgggtttgacaaggttcttcccttttacatactgctgtctatgtggctgtatcttgtttttccactactgctaccacaactatattatcatgcaaatgctgtattcttctttggtggagataaagatttcttgagttttgttttaaaattaaagctaaagtatctgtattgcattaaatataatatcgacacagtgctttccgtggcactgcatacaatctgaggcctcctctctcagtttttatatagatggcgagaacctaagtttcagttgattttacaattgaaatgactaaaaaacaaagaagacaacattaaaaacaatattgtttcta

SEQ ID NO: 1014 - DNA, 330 bp, Homo sapiens; identical to SEQ ID NO: 453

SEQ ID NO: 1015 - DNA, 354 bp, Homo sapiens
tttttttttttttttttgtcatatccataaagtttattttaaaaaactgttaaaaactaaccatacaggtttattaatatacttaaaaagtttgttccctatgttgaagtaaaatacattagcaacatcttccggacaccatctttataaaagtaaaacttctagatcctgaaatgtactacagtagagtctatagtttacacttttaatcacagattggaattcattctccttactcccctacttcccacatgtggcagttattacttcaaaattaatgacattcactcatgttatactaccacagatccttaaatagagtacatactgcataattactaacagagccagtct

SEQ ID NO: 1016 - DNA, 478 bp, Homo sapiens
  misc_feature (1)...(478): n=a,t,g or c
gcgaccgacacgtcctccatgtccgcgcccagccggnctcgcgccgcctgcagctccttggacagccgtgcccgcgtctcctccgccaccggggtcagttgttcctccagttccgatttgtaggccttcaactccttcatggtctcgtccatcagcgccctcagttcctgggtgacctgggagctcgagcagctcctcctgcacctgctcagacagtgtctgcacccagcgcaggtaatcccaaaagcgacccagtgccagttcccagcgctggccgctctgccactcggtctgctggcgcagtcgnggctccggctctgtctccaccgcttgctccaccttggcctggcatcctgccaggaatgtgaccagcaacgcagcccacagaaccttcatcttcctgcctgtgattggccagtcggctcctggggaaggacgtccttcaacctcgtgccgaattcttggcctcgaaggcaaa

SEQ ID NO: 1017 - DNA, 497 bp, Homo sapiens
  misc_feature (1)...(497): n=a,t,g or c
caaaaacatataaataaaatccatccctcttgtcggggacctgcaggggggcaaccttaatccaaacacctggctatcaaataatcagaatgtattgtctcagacaggatttcagttccgggaggcaggggcatgangnnnganggggccggantgangagacaaaagttccagagcctccctcgaaggttctctactactgtattctgtacataatgtaccatcccatgtggaatctgtgagtgtcctcttaagtagcgtgggctagccaatctgccgttcatggtgtattgtaaactccgaattccatatgtaataggatgcaagtctaagcgtttcatgtggacataaatgtatctaaataaaactttccctagcactgtggctgacctcacccttacttttatactttagtatgaaacttgatgagaacttttggnaagtgaagtanttttttttatatatatacatatataatgtaactatcctattatata

SEQ ID NO: 1018 - DNA, 422 bp, Homo sapiens
  misc_feature (1)...(422): n=a,t,g or c
gcattagacacagtttaatcgccttcaaatagatgaaaagttccggtttacactcccccaccgcataagtcatccagacaggaccctggcttagaaagaggaaaacacaggtgctctaggaaatatagccacatataatacataaatcttcttccctgaaatagagcaggtcctgagcagagtgactgggggccacagccacccccagggtgaagtggctctgggactctgccggtggaagtgctggaagagcggggcttggagggaagcccccagtgtggttaccatagccagaggtgggccgaggcttaagggtgagttacccgagangcaagcagtgctggggctttccctcactcagccgaggcttaaatggaagaactggttagcatttttttttttttganggtacatcgggggag

SEQ ID NO: 1019 - DNA, 367 bp, Homo sapiens
gatttaaataggtttatttcttcatttacaagaggaatatatttggcttctctcttaagactctgagattcacaatcagcagctctaaaaaataaaggagcagtttggcttccggaagaagaggaggcaacactcggacctggttcttgtacaacaagaaaacatcgctggggccccgctgaggctggagtgggggtggaggctggtctttggaggatgccacccccaccccatcctcttgtcaggccctcggggtaccccagaagcttggtgggtgagtattccacctgcttacacaccactgaaagccacagccagccagtaactaaggggcaagaagagcattgtccaagctggccctcatgcc

SEQ ID NO: 1020 - DNA, 320 bp, Homo sapiens; identical to SEQ ID NO: 462

SEQ ID NO: 1021 - DNA, 471 bp, Homo sapiens
  misc_feature (1)...(471): n=a,t,g or c
tttttttttttttttttttaatagaacaagaagtttattactcccactcagtagttcctgggggctttgatgttaagtcatacataattcgagaaataccaggaatcttcttaatctcagtgaccatctttaataccacctctacngggatctcattgccaggtgttgcaggtataccagtcatgaagtcactagtaataaaggttcgaataaccacagatctctggcatgaaggctgcttttgaagtgggtcccgatcaaaatgtaatggtgtcaaaatcaccggcatcnggctgattttcccagcatacccagactccctgngaatgttatgggcctcaaaatcagcttgggcgtaaaagtacttgngcaccccntgttgtcaagaaagttgggagtaacatctgtaggaggttctttaactggtgggccaaatntataaaccactccgttaacgttgnggacacatgg

SEQ ID NO: 1022 - DNA, 408 bp, Homo sapiens
gaacaagtacaaatttagcaattttaatcaatattcttgcagacaagtgtggatatgtatatgcatatatacatatatatatcaaaattgagaatttacaaataagatttgatacatttattctagcagtgggtaagtccatagagtaaatttcaagtaggatatatttattttctttggtggtgtttttaataattcctttctactgcatacaaagggacctgaagcttaaattcagttagttttggagaaatccaaaatgagaaaaacagaaagcatgtagcattccatgaagcaagaacagcgtgcatatgctattcctggaaatactgaagtgtccgaatttcatgcctaaaaagtctgggaaatcacactgaatcagttgctggtttctgatgtctctgggat

SEQ ID NO: 1023 - DNA, 470 bp, Homo sapiens; identical to SEQ ID NO: 468
  misc_feature (1)...(470): n=a,t,g or c

SEQ ID NO: 1024 - DNA, 292 bp, Homo sapiens
  misc_feature (1)...(292): n=a,t,g or c
tgtgcttttgacactttatccgtttttatttaaaaacatgctaaaaacatggtgttccataaagccaggaccaggatgaaggaacgcacagatacggcaatgcaagcagaaagtgcatctgaaaccaacaagcgtgctcaccctgctctccctcccgtgctgcccgggggangcaaggtgggcaaggagggggcaggaagcccccatggcctcacctcctgagtccccaatcagggcagggaggccaggccccaccctggactattgactcactgcagtggggaggaggaaa

SEQ ID NO: 1025 - DNA, 165 bp, Homo sapiens
ctctttgagtaactttattttggaggagttccataagcattaggaacatacataaaatgacacaccactgttgacaatgaaaaaaaaaacagcatttgatattttccagctttttaagttaaaaaatgattcagttaaaacaaaacaaaagtttagatattttag

SEQ ID NO: 1026 - DNA, 252 bp, Homo sapiens
  misc_feature (1)...(252): n=a,t,g or c
tttttttaaaacattaaataattttattcttttctcatttacagtagcccagtggtaagcatgttagaaaacctgaagaaatttaaaagtttttggtttacaaaaagcatgtataaaaatacctgttcagacaaacaaagatctcgatcattacattgcccagctttaagaatcccaaaaataactaaaatactgtcaatcaaatgagagggctacatgggnttattaaagtttattttaacaattttagcg

SEQ ID NO: 1027 - DNA, 439 bp, Homo sapiens
tttttgatttaaaagattttattttctttatgcaggtaggcagttagaaatttcaaagtctaacaatgacattcttgaagtgggcacagcttttaaactcaggctatgtatacagtaaccttgtggaactggttcagccagatcttcactttcatgaaagcacagggtctgtccttttctttccagagggctcctctcatattccatcgccagtttctgttacaaggcagactgaatcaagccaagatcaacacacactggtacacgtggctcccaaccaattttatatgtatatatatattctacttccaacacccgcattcatcctggttcaatcaaagcctggttttggccaacaataaactcgtcaggagatcgaaggttgtagatgtctgcacgtggcttccttggaggtccagtggtgactccctcttccaaa

SEQ ID NO: 1028 - DNA, 413 bp, Homo sapiens
  misc_feature (1)...(413): n=a,t,g or c
ttggnttgagtttggcctttcctactgcagccaggtgagagcttaagatgtcagtccccaatatcttcacagagtgcctttatgaccagtttggagaattacgatggtaaggggaagaggcagatatgaagaggaatggttaggggaattgtcattcataactctgtgctatattacttgaggggctaagaaaaatgtatggtcagtgaaacacagtagtgtacccttaaatgccttataaaagaccatccatccagtctgcgcttttgactgtgtgcaagtatcagtaataatgcttttggggggctcagatgaacagcgaacacccaatcagccaggggctctgggaagggaaagctcccaaaaatgaggaagtcccttccaacacccatttttcccattactgttctcac

SEQ ID NO: 1029 - DNA, 284 bp, Homo sapiens; identical to SEQ ID NO: 480

SEQ ID NO: 1030 - DNA, 371 bp, Homo sapiens; identical to SEQ ID NO: 481
  misc_feature (1)...(371): n=a,t,g or c

SEQ ID NO: 1031 - DNA, 348 bp, Homo sapiens
ttgcataacaagtttatttttttaaaaggcatatagacaataaacaaagtaaataatcagatcttaacttctgtcctagacttgttccgttaagttctagtctgtgagcacttgtagttcaataatcgtcatcttcatcagagtccattacttttcttctgttgaatttcactgttgttgtcttttctgtttgttggcttacttttttaaggatttctattaaaccttgttctgataccttctcacttaggttgtccatatcttgccatctgtataagggtaattctctactgctttaggttttttcagggctttacaaggtgctaaggttacttaacctggggcccg

SEQ ID NO: 1032 - DNA, 449 bp, Homo sapiens
  misc_feature (1)...(449): n=a,t,g or c
cgaaagtgtcatcaatttgtaattttagtattaactctgtaaaagtgtctgtaggtacgttttatattatataaggacagaccaaaaatcaacctatcaaagcttcaaaaactttgggaaagggtgggattaagtacaagcacatttggcttacagtaaatgaactgatttttattaactgcttttgcccatataaaatgctgatatttactggaaacctagccagcttcacgattatgactaaagtaccagattataatgccagaatataatgtgcaggcaatcgtgggatgtctctgacaaagtgtgtctcaaaaataatattactttttacattaaaggaaattttaatgtttctctgggagttgggggctcctnggcttttcagagtttgggttaatcngtgttggaattctaggtggatccaaccatattggggcccnctcctt

SEQ ID NO: 1033 - DNA, 431 bp, Homo sapiens
  misc_feature (1)...(431): n=a,t,g or c
anattcggcacaggaagttggagggagatgcagctttaaacagattatttcagcagatctattcagatggttctgatgaagtgaaacgngccatgaacaaatcctttatggagtcgggtggtacagttttgagtaccaactggtctgatgtaggtaaaaggaaagttgaaatcaatcctcctgatgatatggaatggaaaaagtactaaataaattaatttgctctcatcgtattgtgtatattcacctaatgcccattgtgtattgatattgcattcttgaattttgaacactgaatatctttttgaaagattatacttctttacctctttgtgctttagaaattattttccttcaagtgttcaagtctaatgaagaatgaagataacattttatccacngcgtccntaaagattncagacagggtgaaa

SEQ ID NO: 1034 - DNA, 558 bp, Homo sapiens
cgagtcagtgccgtttgcgccagttggatcgaagcctcttaaaatggcagatgatttggacttcgagacaggagatgcaggggcctcagccaccttcccaatgcagtgctcagcattacgtaagaatggctttgtggtgctcaaaggctggccatgtaagatcgtggagatgtctgcttcgaagactggcaagcacggccacgccaaggtccatctggttggtattgacatctttactgggaagaaatatgaagatatctgcccatcaactcataatatggatgtccccaacatcagaaggaatgacttccagctgattggcatccaggatgggtacctatcactgctccaggacagtggggaggtaccagaggaccttcgtctccctgagggagaccttggcaaggagattgagcagaagtacgactgtggagaagagatcctgatcacggtgctgtctgccatgacagaggaggcagctgttgcaatcaaggccatggcaaaataactggctcccagggtggcagtggtggcagcagtgatcctccgaacctgcag

SEQ ID NO: 1035 - DNA, 534 bp, Homo sapiens; identical to SEQ ID NO: 486

SEQ ID NO: 1036 - DNA, 2237 bp, Homo sapiens
aattccgggaaacgccggcacgaaggcctcccaggcctggccgtgcagtggggcgccatcgggcacgtgggcattttggtggagacgatgagcaccaacgacacgatcgtcagtggcacgctgccccagcgcatggcgtcctgcctggaggtgctggacctcttcctgaaccagccccacatggtcctgagcagctttgtgctggctgagaaggctgcggcctatagggacagggacagccagcgggacctggtggaggccgtggcacacattctgggcatccgcgacttggctgctgtcaacctggacagctcactggcggacctgggcctggactcgctcatgagcgtggaggtgcgccagacgctggagcgtgagctcaacctggtgctgtccgtgcgcgaggtgcggcaactcacgctccggaaactgcaggagctgtcctcaaaggcggatgaggccagcgagctggcatgccccacgcccaaggaggatggtctggcccagcagcagactcagctgaacctgcgctccctgctggtgaacccggagggccccaccctgatgcggctcaactccgtgcagagctcggagcggcccctgttcctggtgcacccaatcgagggctccaccaccgtgttccacagcctggcctcccggctcagcatccccacctatggcctgcagtgcacccgagctgcgccccttgacagcatccacagcctggctgcctactacatcgactgcatcaggcaggtgcagcccgagggcccctaccgcgtggccggctactcctacggggcctgcgtggcctttgaaatgtgctcccagctgcaggcccagcagagcccagcccccacccacaacagcctcttcctgttcgacggctcgcccacctacgtactggcctacacccagagctaccgggcaaagctgaccccaggctgtgaggctgagcctgagacggaggccatatgcttcttcgtgcagcagttcacggacatggagcacaacagggtgctggaggccctgctgccgctgaagggcctagaggagcgtgtggcagccgccgtggacctgatcatcaagagccaccagggcctggaccgccaggagctgagctttgcggcccggtccttctactacaagctgcgtgccgctgagcagtacacacccaaggccaagtaccatggcaacgtgatgctactgcgcgccaagacgggtggcacctacgggcaggacctgggcgcggactacaacctctcccaggtatgcgacgggaaagtatccgtccacgtcatcgagggtgaccaccgcacgctgctggagggcagcggcctggagtccatcatcagcatcatccacagctccctggctgagccacgcgtgagcgtgcgggagggctaggcccgtgcccccgcctgccaccggaggtcactccaccatccccaccccaccccaccccacccccgccatgcaacgggattgaagggtcctgccggtgggaccctgtccggcccagtgccactgccccccgaggctgctagacgtaggtgttaggcatgtcccacccacccgccgcctcccacggcacctcggggacaccagagctgccgacttggagactcctggtctgtgaagagccggtggtgcccgtgcccgcaggaactgggctgggcctcgtgcgcccgtggggtctgcgcttggtctttctgtgcttggatttgcatatttattgcattgctggtagagacccccaggcctgtccaccctgccaagactcctcaggcagcgtgtgggtcccgcactctgcccccatttccccgatgttcccttgcgggacgcgggcagccacccaagcctgctggctgcggccccctctcggccaggcattggctcagcccgctgagtggggggtcgtgggccagtccccgaggagctgggcccctgcacaggcacacagggcccggccacacccagcggccccccgcacagccacccgtggggtgctgcccttatgcccggcgccgggcaccaactccatgtttggtgtttgtctgtgtttgtttttcaagaaatgattcaaattgctgcttggattttgaaatttactgtaactgtcagtgtacacgtctggaccccgtttcatttttacaccaatttggtaaaaatgctgctctcagcctcccacaattaaaccgcatgtgatctccaaaaaaaaaaaaaaaaaaaaaaaa

SEQ ID NO: 1037 - DNA, 250 bp, Homo sapiens
caaataggacataaaggtccctagatttttaatcaaaatattttacaatttttgctctgctagcatgagatcaacaagaaaacccaacaggaatacataaaaaacttaacaagttgactttaataagtaaaaattacaacattcttctcccagcaatgaacaatttcattttttaaaagtaaacgaggcctaaaacaagagggcacaggaacaagtagtcagatggatttaggtgagcactgtacacaag

SEQ ID NO: 1038 - DNA, 458 bp, Homo sapiens
  misc_feature (1)...(458): n=a,t,g or c
agaagattcaaacaccatctattgagcacctacattgtgtgccaggtagtaaaataggtgctttcatacacattgtctcaattcctgtgaggtcagaattatctctgcatttgaaacttgaggaaacatgctcagagtgcaagaagcttccttgcctgagatcacctagaaaggaaccctcagagccggcaactgaatcttggtccctgtgatgtcaagcccattgctctnccactncagaacatggcctctagattaatgccaccgattcaggaacacctccgacagttttgaaatacccccatgttgccttgtttgttttttccttctgggcttcttctattacagtctctttcattgggaaggctctgttagggccaagggccaggaggctggattactggacacgggagtcccaatgtcaggattngccancattcaggatngcttggggggtt

SEQ ID NO: 1039 - DNA, 11185 bp, Homo sapiens
gctgccccgagcctttctggggaagaactccaggcgtgcggacgcaacagccgagaacattaggtgttgtggacaggagctgggaccaagatcttcggccagccccgcatcctcccgcatcttccagcaccgtcccgcaccctccgcatccttccccgggccaccacgcttcctatgtgacccgcctgggcaacgccgaacccagtcgcgcagcgctgcagtgaattttccccccaaactgcaataagccgccttccaaggccaagatgttcataaatataaagagcatcttatggatgtgttcaaccttaatagtaacccatgcgctacataaagtcaaagtgggaaaaagcccaccggtgaggggctccctctctggaaaagtcagcctaccttgtcatttttcaacgatgcctactttgccacccagttacaacaccagtgaatttctccgcatcaaatggtctaagattgaagtggacaaaaatggaaaagatttgaaagagactactgtccttgtggcccaaaatggaaatatcaagattggtcaggactacaaagggagagtgtctgtgcccacacatcccgaggctgtgggcgatgcctccctcactgtggtcaagctgctggcaagtgatgcgggtctttaccgctgtgacgtcatgtacgggattgaagacacacaagacacggtgtcactgactgtggatggggttgtgtttcactacagggcggcaaccagcaggtacacactgaattttgaggctgctcagaaggcttgtttggacgttggggcagtcatagcaactccagagcagctctttgctgcctatgaagatggatttgagcagtgtgacgcaggctggctggctgatcagactgtcagatatcccatccgggctcccagagtaggctgttatggagataagatgggaaaggcaggagtcaggacttatggattccgttctccccaggaaacttacgatgtgtattgttatgtggatcatctggatggtgatgtgttccacctcactgtccccagtaaattcaccttcgaggaggctgcaaaagagtgtgaaaaccaggatgccaggctggcaacagtgggggaactccaggcggcatggaggaacggctttgaccagtgcgattacgggtggctgtcggatgccagcgtgcgccaccctgtgactgtggccagggcccagtgtggaggtggtctacttggggtgagaaccctgtatcgttttgagaaccagacaggcttccctccccctgatagcagatttgatgcctactgctttaaacctaaagaggctacaaccatcgatttgagtatcctcgcagaaactgcatcacccagtttatccaaagaaccacaaatggtttctgatagaactacaccaatcatccctttagttgatgaattacctgtcattccaacagagttccctcccgtgggaaatattgtcagttttgaacagaaagccacagtccaacctcaggctatcacagatagtttagccaccaaattacccacacctactggcagtaccaagaagccctgggatatggatgactactcaccttctgcttcaggacctcttggaaagctagacatatcagaaattaaggaagaagtgctccagagtacaactggcgtctctcattatgctacggattcatgggatggtgtcgtggaagataaacaaacacaagaatcggttacacagattgaacaaatagaagtgggtcctttggtaacatctatggaaatcttaaagcacattccttccaaggaattccctgtaactgaaacaccattggtaactgcaagaatgatcctggaatccaaaactgaaaagaaaatggtaagcactgtttctgaattggtaaccacaggtcactatggattcaccttgggagaagaggatgatgaagacagaacacttacagttggatctgatgagagcaccttgatctttgaccaaattcctgaagtcattacggtgtcaaagacttcagaagacaccatccacactcatttagaagacttggagtcagtctcagcatccacaactgtttcccctttaattatgcctgataataatggatcatccatggatgactgggaagagagacaaactagtggtaggataacggaagagtttcttggcaaatatctgtctactacaccttttccatcacagcatcgtacagaaatagaattgtttccttattctggtgataaaatattagtagagggaatttccacagttatttatccttctctacaaacagaaatgacacatagaagagaaagaacagaaacactaataccagagatgagaacagatacttatacagatgaaatacaagaagagatcactaaaagtccatttatgggaaaaacagaagaagaagtcttctctgggatgaaactctctacatctctctcagagccaattcatgttacagagtcttctgtggaaatgaccaagtcttttgatttcccaacattgataacaaagttaagtgcagagccaacagaagtaagagatatggaggaagactttacagcaactccaggtactacaaaatatgatgaaaatattacaacagtgcttttggcccatggtactttaagtgttgaagcagccactgtatcaaaatggtcatgggatgaagataatacaacatccaagcctttagagtctacagaaccttcagcctcttcaaaattgccccctgccttactcacaactgtggggatgaatggaaaggataaagacatcccaagtttcactgaagatggagcagatgaatttactcttattccagatagtactcaaaagcagttagaggaggttactgatgaagacatagcagcccatggaaaattcacaattagatttcagccaactacatcaactggtattgcagaaaagtcaactttgagagattctacaactgaagaaaaagttccacctatcacaagcactgaaggccaagtttatgcaaccatggaaggaagtgctttgggtgaagtagaagatgtggacctctctaagccagtatctactgttccccaatttgcacacacttcagaggtggaaggattagcatttgttagttatagtagcacccaagagcctactacttatgtagactcttcccataccattcctctttctgtaattcccaagacagactggggagtgttagtaccttctgttccatcagaagatgaagttctaggtgaaccctctcaagacatacttgtcattgatcagactcgccttgaagcgactatttctccagaaactatgagaacaacaaaaatcacagagggaacaactcaggaagaattcccttggaaagaacagactgcagagaaaccagttcctgctctcagttctacagcttggactcccaaggaggcagtaacaccactggatgaacaagagggcgatggatcagcatatacagtctctgaagatgaattgttgacaggttctgagagggtcccagttttagaaacaactccagttggaaaaattgatcacagtgtgtcttatccaccaggtgctgtaactgagcacaaagtgaaaacagatgaagtggtaacactaacaccacgcattgggccaaaagtatctttaagtccagggcctgaacaaaaatatgaaacagaaggtagtagtacaacaggatttacatcatctttgagtccttttagtacccacattacccagcttatggaagaaaccactactgagaaaacatccctagaggatattgatttaggctcaggattatttgaaaagcccaaagccacagaactcatagaattttcaacaatcaaagtcacagttccaagtgatattaccactgccttcagttcagtagacagacttcacacaacttcagcattcaagccatcttccgcgatcactaagaaaccacctctcatcgacagggaacctggtgaagaaacaaccagtgacatggtaatcattggagaatcaacatctcatgttcctcccactacccttgaagatattgtagccaaggaaacagaaaccgatattgatagagagtatttcacgacttcaagtcctcctgctacacagccaacaagaccacccactgtggaagacaaagaggcctttggacctcaggcgctttctacgccacagcccccagcaagcacaaaatttcaccctgacattaatgtttatattattgaggtcagagaaaataagacaggtcgaatgagtgatttgagtgtaattggtcatccaatagattcagaatctaaagaagatgaaccttgtagtgaagaaacagatccagtgcatgatctaatggctgaaattttacctgaattccctgacataattgaaatagacctataccacagtgaagaaaatgaagaagaagaagaagagtgtgcaaatgctactgatgtgacaaccaccccatctgtgcagtacataaatgggaagcatctcgttaccactgtgcccaaggacccagaagctgcagaagctaggcgtggccagtttgaaagtgttgcaccttctcagaatttctcggacagctctgaaagtgatactcatccatttgtaatagccaaaacggaattgtctactgctgtgcaacctaatgaatctacagaaacaactgagtctcttgaagttacatggaagcctgagacttaccctgaaacatcagaacatttttcaggtggtgagcctgatgttttccccacagtcccattccatgaggaatttgaaagtggaacagccaaaaaaggggcagaatcagtcacagagagagatactgaagttggtcatcaggcacatgaacatactgaacctgtatctctgtttcctgaagagtcttcaggagagattgccattgaccaagaatctcagaaaatagcctttgcaagggctacagaagtaacatttggtgaagaggtagaaaaaagtacttctgtcacatacactcccactatagttccaagttctgcatcagcatatgtttcagaggaagaagcagttaccctaataggaaatccttggccagatgacctgttgtctaccaaagaaagctgggtagaagcaactcctagacaagttgtagagctctcagggagttcttcgattccaattacagaaggctctggagaagcagaagaagatgaagatacaatgttcaccatggtaactgatttatcacagagaaatactactgatacactcattactttagacactagcaggataatcacagaaagcttttttgaggttcctgcaaccaccatttatccagtttctgaacaaccttctgcaaaagtggtgcctaccaagtttgtaagtgaaacagacacttctgagtggatttccagtaccactgttgaggaaaagaaaaggaaggaggaggagggaactacaggtacggcttctacatttgaggtatattcatctacacagagatcggatcaattaattttaccctttgaattagaaagtccaaatgtagctacatctagtgattcaggtaccaggaaaagttttatgtccttgacaacaccaacacagtctgaaagggaaatgacagattctactcctgtctttacagaaacaaatacattagaaaatttgggggcacagaccactgagcacagcagtatccatcaacctggggttcaggaagggctgaccactctcccacgtagtcctgcctctgtctttatggagcagggctctggagaagctgctgccgacccagaaaccaccactgtttcttcattttcattaaacgtagagtatgcaattcaagccgaaaaggaagtagctggcactttgtctccgcatgtggaaactacattctccactgagccaacaggactggttttgagtacagtaatggacagagtagttgctgaaaatataacccaaacatccagggaaatagtgatttcagagcgattaggagaaccaaattatggggcagaaataaggggcttttccacaggttttcctttggaggaagatttcagtggtgactttagagaatactcaacagtgtctcatcccatagcaaaagaagaaacggtaatgatggaaggctctggagatgcagcatttagggacacccagacttcaccatctacagtacctacttcagttcacatcagtcacatatctgactcagaaggacccagtagcaccatggtcagcacttcagccttcccctgggaagagtttacatcctcagctgagggctcaggtgagcaactggtcacagtcagcagctctgttgttccagtgcttcccagtgctgtgcaaaagttttctggtacagcttcctccattatcgacgaaggattgggagaagtgggtactgtcaatgaaattgatagaagatccaccattttaccaacagcagaagtggaaggtacgaaagctccagtagagaaggaggaagtaaaggtcagtggcacagtttcaacaaactttccccaaactatagagccagccaaattatggtctaggcaagaagtcaaccctgtaagacaagaaattgaaagtgaaacaacatcagaggaacaaattcaagaagaaaagtcatttgaatcccctcaaaactctcctgcaacagaacaaacaatctttgattcacagacatttactgaaactgaactcaaaaccacagattattctgtactaacaacaaagaaaacttacagtgatgataaagaaatgaaggaggaagacacttctttagttaacatgtctactccagatccagatgcaaatggcttggaatcttacacaactctccctgaagctactgaaaagtcacattttttcttagctactgcattagtaactgaatctataccagctgaacatgtagtcacagattcaccaatcaaaaaggaagaaagtacaaaacattttccgaaaggcatgagaccaacaattcaagagtcagatactgagctcttattctctggactgggatcaggagaagaagttttacctactctaccaacagagtcagtgaattttactgaagtggaacaaatcaataacacattatatccccacacttctcaagtggaaagtacctcaagtgacaaaattgaagactttaacagaatggaaaatgtggcaaaagaagttggaccactcgtatctcaaacagacatctttgaaggtagtgggtcagtaaccagcacaacattaatagaaattttaagtgacactggagcagaaggacccacggtggcacctctccctttctccacggacatcggacatcctcaaaatcagactgtcaggtgggcagaagaaatccagactagtagaccacaaaccataactgaacaagactctaacaagaattcttcaacagcagaaattaacgaaacaacaacctcatctactgattttctggctagagcttatggttttgaaatggccaaagaatttgttacatcagcaccaaaaccatctgacttgtattatgaaccttctggagaaggatctggagaagtggatattgttgattcatttcacacttctgcaactactcaggcaaccagacaagaaagcagcaccacatttgtttctgatgggtccctggaaaaacatcctgaggtgccaagcgctaaagctgttactgctgatggattcccaacagtttcagtgatgctgcctcttcattcagagcagaacaaaagctcccctgatccaactagcacactgtcaaatacagtgtcatatgagaggtccacagacggtagtttccaagaccgtttcagggaattcgaggattccaccttaaaacctaacagaaaaaaacccactgaaaatattatcatagacctggacaaagaggacaaggatttaatattgacaattacagagagtaccatccttgaaattctacctgagctgacatcggataaaaatactatcatagatattgatcatactaaacctgtgtatgaagacattcttggaatgcaaacagatatagatacagaggtaccatcagaaccacatgacagtaatgatgaaagtaatgatgacagcactcaagttcaagagatctatgaggcagctgtcaacctttctttaactgaggaaacatttgagggctctgctgatgttctggctagctacactcaggcaacacatgatgaatcaatgacttatgaagatagaagccaactagatcacatgggctttcacttcacaactgggatccctgctcctagcacagaaacagaattagacgttttacttcccacggcaacatccctgccaattcctcgtaagtctgccacagttattccagagattgaaggaataaaagctgaagcaaaagccctggatgacatgtttgaatcaagcactttgtctgatggtcaagctattgcagaccaaagtgaaataataccaacattgggccaatttgaaaggactcaggaggagtatgaagacaaaaaacatgctggtccttcttttcagccagaattctcttcaggagctgaggaggcattagtagaccatactccctatctaagtattgctactacccaccttatggatcagagtgtaacagaggtgcctgatgtgatggaaggatccaatcccccatattacactgatacaacattagcagtttcaacatttgcgaagttgtcttctcagacaccatcatctcccctcactatctactcaggcagtgaagcctctggacacacagagatcccccagcccagtgctctgccaggaatagacgtcggctcatctgtaatgtccccacaggattcttttaaggaaattcatgtaaatattgaagcaactttcaaaccatcaagtgaggaataccttcacataactgagcctccctctttatctcctgacacaaaattagaaccttcagaagatgatggtaaacctgagttattagaagaaatggaagcttctcccacagaacttattgctgtggaaggaactgagattctccaagatttccaaaacaaaaccgatggtcaagtttctggagaagcaatcaagatgtttcccaccattaaaacacctgaggctggaactgttattacaactgccgatgaaattgaattagaaggtgctacacagtggccacactctacttctgcttctgccacctatggggtcgaggcaggtgtggtgccttggctaagtccacagacttctgagaggcccacgctttcttcttctccagaaataaaccctgaaactcaagcagctttaatcagagggcaggattccacgatagcagcatcagaacagcaagtggcagcgagaattcttgattccaatgatcaggcaacagtaaaccctgtggaatttaatactgaggttgcaacaccaccattttcccttctggagacttctaatgaaacagatttcctgattggcattaatgaagagtcagtggaaggcacggcaatctatttaccaggacctgatcgctgcaaaatgaacccgtgccttaacggaggcacctgttatcctactgaaacttcctacgtatgcacctgtgtgccaggatacagcggagaccagtgtgaacttgattttgatgaatgtcactctaatccctgtcgtaatggagccacttgtgttgatggttttaacacattcaggtgcctctgccttccaagttatgttggtgcactttgtgagcaagataccgagacatgtgactatggctggcacaaattccaagggcagtgctacaaatactttgcccatcgacgcacatgggatgcagctgaacgggaatgccgtctgcagggtgcccatctcacaagcatcctgtctcacgaagaacaaatgtttgttaatcgtgtgggccatgattatcagtggataggcctcaatgacaagatgtttgagcatgacttccgttggactgatggcagcacactgcaatacgagaattggagacccaaccagccagacagcttcttttctgctggagaagactgtgttgtaatcatttggcatgagaatggccagtggaatgatgttccctgcaattaccatctcacctatacgtgcaagaaaggaacagttgcttgcggccagccccctgttgtagaaaatgccaagacctttggaaagatgaaacctcgttatgaaatcaactccctgattagataccactgcaaagatggtttcattcaacgtcaccttccaactatccggtgcttaggaaatggaagatgggctatacctaaaattacctgcatgaacccatctgcataccaaaggacttattctatgaaatactttaaaaattcctcatcagcaaaggacaattcaataaatacatccaaacatgatcatcgttggagccggaggtggcaggagtcgaggcgctgatccctaaaatggcgaacatgtgttttcatcatttcagccaaagtcctaacttcctgtgcctttcctatcacctcgagaagtaattatcagttggtttggatttttggaccaccgttcagtcattttgggttgccgtgctcccaaaacattttaaatgaaagtattggcattcaaaaagacagcagacaaaatgaaagaaaatgagagcagaaagtaagcatttccagcctatctaatttctttagttttctatttgcctccagtgcagtccatttcctaatgtataccagcctactgtactatttaaaatgctcaatttcagcaccgatggccatgtaaataagatgatttaatgttgattttaatcctgtatataaaataaaaagtcacaatgagtttgggcatatttaatgatgattatggagccttagaggtctttaatcattggttcggctgcttttatgtagtttaggctggaaatggtttcacttgctctttgactgtcagcaagactgaagatggcttttcctggacagctagaaaacacaaaatcttgtaggtcattgcacctatctcagccataggtgcagtttgcttctacatgatgctaaaggctgcgaatgggatcctgatggaactaaggactccaatgtcgaactcttctttgctgcattcctttttcttcacttacaagaaaggcctgaatggaggacttttctgtaaccagg

SEQ ID NO: 1040 - DNA, 2638 bp, Homo sapiens
gaggaaaggggaaatgcggcccgctccccactcagtgccactctgtgccactccgtgccaggccctgagggcacccggttgctgcttccttccgtctttccccaaggactatcagagatgccagcgtgacccctgacacgtgtgtgcagcagcctgcagctgccccaagccatggctgaacactgactcccagctgtgggcttcaccattacagactccccagggcttcaaagacttctcagcttcgagcatggcttttggctgtcagggcagctgtacaatagtggatgtttgagacggaggcagatgagaagagggagatggccttggaggaagggaaggggcctggtgccgaggattccccacccagcaaggagccctctcctggccaggagcttcctccaggacaagaccttccacccaacaaggactccccttctgggcaggaacccgctcccagccaagaaccactgtccagcaaagactcagctacctctgaaggatcccctccaggcccagatgctccgcccagcaaggatgtgccaccatgccaggaaccccctccagcccaagacctctcaccctgccaggacctacctgctggtcaagaacccctgcctcaccaggaccctctactcaccaaagacctccctgccatccaggaatcccccacccgggaccttccaccctgtcaagatctgcctcctagccaggtctccctgccagccaaggcccttactgaggacaccatgagctccggggacctactagcagctactggggacccacctgcggcccccaggccagccttcgtgatccctgaggtccggctggatagcacctacagccagaaggcaggggcagagcagggctgctcgggagatgaggaggatgcagaagaggccgaggaggtggaggagggggaggaaggggaggaggacgaggatgaggacaccagcgatgacaactacggagagcgcagtgaggccaagcgcagcagcatgatcgagacgggccagggggctgagggtggcctctcactgcgtgtgcagaactcgctgcggcgccggacgcacagcgagggcagcctgctgcaggagccccgagggccctgctttgcctccgacaccaccttgcactgctcagacggtgagggcgccgcctccacctggggcatgccttcgcccagcaccctcaagaaagagctgggccgcaatggtggctccatgcaccacctttccctcttcttcacaggacacaggaagatgagcggggctgacaccgttggggatgatgacgaagcctcccggaagagaaagagcaaaaacctagccaaggacatgaagaacaagctggggatcttcagacggcggaatgagtcccctggagcccctcccgcgggcaaggcagacaaaatgatgaagtcattcaagcccacctcagaggaagccctcaagtggggcgagtccttggagaagctgctggttcacaaatacgggttagcagtgttccaagccttccttcgcactgagttcagtgaggagaatctggagttctggttggcttgtgaggacttcaagaaggtcaagtcacagtccaagatggcatccaaggccaagaagatctttgctgaatacatcgcgatccaggcatgcaaggaggtcaacctggactcctacacgcgggagcacaccaaggacaacctgcagagcgtcacgcggggctgcttcgacctggcacagaagcgcatcttcgggctcatggaaaaggactcgtaccctcgctttctccgttctgacctctacctggaccttattaaccagaagaagatgagtcccccgctttaggggccactggagtcgagctcagcgttcacaccaggcgggctgggtcccctgcccacctgcctccctgccccctgtgacggagggggcaagcaagcccccagaggccgtgtctctggacagacggatagacatacggaagcgaggcctggaccaagagaggcccaggctactggaggagtagaaggatgggccccgtggggtccccactgccccggtacgagggggcccaagaccctggcaggtcaggggccctggccaagccagatctggagctgctgctccctgctgcggagaccgcggaggcttcgcgttgaccaagttccttaaagaactggctgatggggcaggaggtccaggcctgggctctcgggccctcctagagggccattggagcttgcagctcagacccccactttgagttttatttatttaaatagtagttggatgcttggcacgtcgtcctgtaataggaaacccttgcctcatcagttttcctgatttacaagtgcaatattttagccaatgccttgggagaagctgccatgcaaaggtggacaccattctccagcttcaggggatatgctcgtcccgggcaccggtggcaggcagctggccttctggactaaggcagcctggggggacactgcagtctggctacacacagagatctggcaccccctgggtggagtgtccctcgggggctttgggaaagcatggcaccctcagaccacacagtagccaagttctggagcaaataaaaggcctgtgttatttcttgttcttgaaaaaaa

SEQ ID NO: 1041 - DNA, 4098 bp, Homo sapiens
ggtggcctctgtggccgtccaggctagcggcggcccgcaggcggcggggagaaagactctctcacctggtcttgcggctgtggccaccgccggccaggggtgtggagggcgtgctgccggagacgtccgccgggctctgcagttccgccgggggtcgggcagctatggagccgcggcccacggcgccctcctccggcgccccgggactggccggggtcggggagacgccgtcagccgctgcgctggccgcagccagggtggaactgcccggcacggctgtgccctcggtgccggaggatgctgcgcccgcgagccgggacggcggcggggtccgcgatgagggccccgcggcggccggggacgggctgggcagacccttggggcccaccccgagccagagccgtttccaggtggacctggtttccgagaacgccgggcgggccgctgctgcggcggcggcggcggcggcggcagcggcggcggctggtgctggggcgggggccaagcagacccccgcggacggggaagccagcggcgagagcgagccagctaaaggcagcgaggaagccaagggccgcttccgcgtgaacttcgtggacccagctgcctcctcgtcggctgaagacagcctgtcagatgctgccggggtcggagtcgacgggcccaacgtgagcttccagaacggcggggacacggtgctgagcgagggcagcagcctgcactccggcggcggcggcggcagtgggcaccaccagcactactattatgatacccacaccaacacctactacctgcgcaccttcggccacaacaccatggacgctgtgcccaggatcgatcactaccggcacacagccgcgcagctgggcgagaagctgctccggcctagcctggcggagctccacgacgagctggaaaaggaaccttttgaggatggctttgcaaatggggaagaaagtactccaaccagagatgctgtggtcacgtatactgcagaaagtaaaggagtcgtgaagtttggctggatcaagggtgtattagtacgttgtatgttaaacatttggggtgtgatgcttttcattagattgtcatggattgtgggtcaagctggaataggtctatcagtccttgtaataatgatggccactgttgtgacaactatcacaggattgtctacttcagcaatagcaactaatggatttgtaagaggaggaggagcatattatttaatatctagaagtctagggccagaatttggtggtgcaattggtctaatcttcgcctttgccaacgctgttgcagttgctatgtatgtggttggatttgcagaaaccgtggtggagttgcttaaggaacattccatacttatgatagatgaaatcaatgatatccgaattattggagccattacagtcgtgattcttttaggtatctcagtagctggaatggagtgggaagcaaaagctcagattgttcttttggtgatcctacttcttgctattggtgatttcgtcataggaacatttatcccactggagagcaagaagccaaaagggttttttggttataaatctgaaatatttaatgagaactttgggcccgattttcgagaggaagagactttcttttctgtatttgccatcttttttcctgctgcaactggtattctggctggagcaaatatctcaggtgatcttgcagatcctcagtcagccatacccaaaggaacactcctagccattttaattactacattggtttacgtaggaattgcagtatctgtaggttcttgtgttgttcgagatgccactggaaacgttaatgacactatcgtaacagagctaacaaactgtacttctgcagcctgcaaattaaactttgatttttcatcttgtgaaagcagtccttgttcctatggcctaatgaacaacttccaggtaatgagtatggtgtcaggatttacaccactaatttctgcaggtatattttcagccactctttcttcagcattagcatccctagtgagtgctcccaaaatatttcaggctctatgtaaggacaacatctacccagctttccagatgtttgctaaaggttatgggaaaaataatgaacctcttcgtggctacatcttaacattcttaattgcacttggattcatcttaattgctgaactgaatgttattgcaccaattatctcaaacttcttccttgcatcatatgcattgatcaatttttcagtattccatgcatcacttgcaaaatctccaggatggcgtcctgcattcaaatactacaacatgtggatatcacttcttggagcaattctttgttgcatagtaatgttcgtcattaactggtgggctgcattgctaacatatgtgatagtccttgggctgtatatttatgttacctacaaaaaaccagatgtgaattggggatcctctacacaagccctgacttacctgaatgcactgcagcattcaattcgtctttctggagtggaagaccacgtgaaaaactttaggccacagtgtcttgttatgacaggtgctccaaactcacgtccagctttacttcatcttgttcatgatttcacaaaaaatgttggtttgatgatctgtggccatgtacatatgggtcctcgaagacaagccatgaaagagatgtccatcgatcaagccaaatatcagcgatggcttattaagaacaaaatgaaggcattttatgctccagtacatgcagatgacttgagagaaggtgcacagtatttgatgcaggctgctggtcttggtcgtatgaagccaaacacacttgtccttggatttaagaaagattggttgcaagcagatatgagggatgtggatatgtatataaacttatttcatgatgcttttgacatacaatatggagtagtggttattcgcctaaaagaaggtctggatatatctcatcttcaaggacaagaagaattattgtcatcacaagagaaatctcctggcaccaaggatgtggtagtaagtgtggaatatagtaaaaagtccgatttagatacttccaaaccactcagtgaaaaaccaattacacacaaagttgaggaagaggatggcaagactgcaactcaaccactgttgaaaaaagaatccaaaggccctattgtgcctttaaatgtagctgaccaaaagcttcttgaagctagtacacagtttcagaaaaaacaaggaaagaatactattgatgtctggtggctttttgatgatggaggtttgaccttattgataccttaccttctgacgaccaagaaaaaatggaaagactgtaagatcagagtattcattggtggaaagataaacagaatagaccatgaccggagagcgatggctactttgcttagcaagttccggatagacttttctgatatcatggttctaggagatatcaataccaaaccaaagaaagaaaatattatagcttttgaggaaatcattgagccatacagacttcatgaagatgataaagagcaagatattgcagataaaatgaaagaagatgaaccatggcgaataacagataatgagcttgaactttataagaccaagacataccggcagatcaggttaaatgagttattaaaggaacattcaagcacagctaatattattgtcatgagtctcccagttgcacgaaaaggtgctgtgtctagtgctctctacatggcatggttagaagctctatctaaggacctaccaccaatcctcctagttcgtgggaatcatcagagtgtccttaccttctattcataaatgttctatacagtggacagccctccagaatggtacttcagtgcctagtgtagtaacctgaaatcttcaatgacacattaacatcacaatggcgaatggtgacttttctttcacgatttcattaatttgaaagcacacaggaaagcttgctccattgataacgtgtatggagacttcggttttagtcaattccatatctcaatcttaatggtgattcttctctgttgaactgaagtttgtgagagtagttttcctttgctacttgaatagcaataaaagcgtgttaactttttgg

SEQ ID NO: 1042 - DNA, 3147 bp, Homo sapiens
gtcgcgccattttgccggggtttgaatgtgaggcggagcggcggcaggagcggatagtgccagctacggtccgcggctggggttccctcctccgtttctgtatccccacgagatcctatagcaatggaactcagcgatgcaaatctgcaaacactaacagaatatttaaagaaaacacttgatcctgatcctgccatccgacgtccagctgagaaatttcttgaatctgttgaaggaaatcagaattatccactgttgcttttgacattactggagaagtcccaggataatgttatcaaagtatgtgcttcagtaacattcaaaaactatattaaaaggaactggagaattgttgaagatgaaccaaacaaaatttgtgaagccgatcgagtggccattaaagccaacatagtgcacttgatgcttagcagcccagagcaaattcagaagcagttaagtgatgcaattagcattattggcagagaagattttccacagaaatggcctgacttgctgacagaaatggtgaatcgctttcagagtggagatttccatgttattaatggagtcctccgtacagcacattcattatttaaaagataccgtcatgaatttaagtcaaacgagttatggactgaaattaagcttgttctggatgcctttgctttgcctttgactaatctttttaaggccactattgaactctgcagtacccatgcaaatgatgcctctgccctgaggattctgttttcttccctgatcctgatctcaaaattgttctatagtttaaactttcaggatctccctgaattttgggaaggtaatatggaaacttggatgaataatttccatactctcttaacattggataataagcttttacaaactgatgatgaagaggaagccggcttattggagctcttaaaatcccagatttgtgataatgccgcactctatgcacaaaagtacgatgaagaattccagcgatacctgcctcgttttgttacagccatctggaatttactagttacaacgggtcaagaggttaaatatgatttgttggtaagtaatgcaattcaatttctggcttcagtttgtgagagacctcattataagaatctatttgaggaccagaacacgctgacaagtatctgtgaaaaggttattgtgcctaacatggaatttagagctgctgatgaagaagcatttgaagataattctgaggagtacataaggagagatttggaaggatctgatattgatactagacgcagggctgcttgtgatctggtacgaggattatgcaagttttttgagggacctgtgacaggaatcttctctggttatgttaattccatgctgcaggaatacgcaaaaaatccatctgtcaactggaaacacaaagatgcagccatctacctagtgacatctttggcatcaaaagcccaaacacagaagcatggaattacacaagcaaatgaacttgtaaacctaactgagttctttgtgaatcacatcctccctgatttaaaatcagctaatgtgaatgaatttcctgtccttaaagctgacggtatcaaatatattatgatttttagaaatcaagtgccaaaagaacatcttttagtctcgattcctctcttgattaatcatcttcaagctggaagtattgttgttcatacttacgcagctcatgctcttgaacggctctttactatgcgagggcctaacaatgccactctctttacagctgcagaaatcgcaccgtttgttgagattctgctaacaaaccttttcaaagctctcacacttcctggctcttcagaaaatgaatatattatgaaagctatcatgagaagtttttctctcctacaagaagccataatcccctacatccctactctcatcactcagcttacacagaagctattagctgttagtaagaacccaagcaaacctcactttaatcactacatgtttgaagcaatatgtttatccataagaataacttgcaaagctaaccctgctgctgttgtaaattttgaggaggctttgtttttggtgtttactgaaatcttacaaaatgatgtgcaagaatttattccatacgtctttcaagtgatgtctttgcttctggaaacacacaaaaatgacatcccgtcttcctatatggccttatttcctcatctccttcagccagtgctttgggaaagaacaggaaatattcctgctctagtgaggcttcttcaagcattcttagaacgcggttcaaacacaatagcaagtgctgcagctgacaaaattcctgggttactaggtgtctttcagaagctgattgcatccaaagcaaatgaccaccaaggtttttatcttctaaacagtataatagagcacatgcctcctgaatcagttgaccaatataggaaacaaatcttcattctgctattccagagacttcagaattccaaaacaaccaagtttatcaagagttttttagtctttattaatttgtattgcataaaatatggggcactagcactacaagaaatatttgatggtatacaaccaaaaatgtttggaatggttttggaaaaaattattattcctgaaattcagaaggtatctggaaatgtagagaaaaagatctgtgcggttggcataaccaacttactaacagaatgtcccccaatgatggacactgagtataccaaactgtggactccattattacagtctttgattggtctttttgagttacccgaagatgataccattcctgatgaggaacattttattgacatagaagatacaccaggatatcagactgccttctcacagttggcatttgctgggaaaaaagagcatgatcctgtaggtcaaatggtgaataaccccaaaattcacctggcacagtcacttcacatgttgtctaccgcctgtccaggaagggttccatcaatggtgagcaccagcctgaatgcagaagcgctccagtatctccaagggtaccttcaggcagccagtgtgacactgctttaaactgcatttttctaatgggctaaacccagatggtttcctaggaaatcacaggcttctgagcacagctgcattaaaacaaaggaagttttccttttgaacttgtcacga

SEQ ID NO: 1043 - DNA, 4233 bp, Homo sapiens
  misc_feature (1)...(4233): n=a,t,g or c
ccctcctcccagtcgaagcacctcctgtccgcccctcagcgcatgggtggcggtcacgtgcccagaacgtccggcgttcgccccgccctcccagtttccgcgcgcctctttggcagctggtcacatggtgagggtgggggtgagggggcctctctagcttgcggcctgtgtctatggtcgggccctctgcgtccagctgctccggaccgagctcgggtgtatggggccgtaggaaccggctccggggccccgataacgggccgcccccacagcaccccgggctggcgtgaggtaagtgcagtcccttcccaggaatgagaaccagtgcccgcccccctcacagctttccacgcgttcgtttcgcgagctggttatggaagggtcgctcaagggcgggaagtggggcctttgtggtcatgggaaagtataattttagggactgaggtgtaggatcttcgatgcaaggcatgtgtcatgtgtgatctttgtgcggggcgcgattgtcccaaaggaaaaagcgttttctattgcagggcctcacgtggctggaggggttggtattgagtcattgtgttatctctggggccggccccaaggaagactgggagcgggggatgggatgctggtggtgttctttgcgctttttttttgggagtccctttgttgctgcaggtcataccatcctaactctgtaagcgacttttggtgataggagtctgtgattgtagggtctcccttgatctgagaatggctacctctcgatatgagccagtggctgaaattggtgtcggtgcctatgggacagtgtacaaggcccgtgatccccacagtggccactttgtggccctcaagagtgtgagagtccccaatggaggaggaggtggaggaggccttcccatcagcacagttcgtgaggtggctttactgaggcgactggaggcttttgagcatcccaatgttgtccggtgagaaggtggtggagggttgggcgtggggagtaaagggaaaagacagcctataggtggggtgtgatgatctgtagagaagtggggaccctgaggaaataatgagaggccatgttgggttaaaggggattgaaaagtgagcatttactctggtcaggctgatggacgtctgtgccacatcccgaactgaccgggagatcaaggtaaccctggtgtttgagcatgtagaccaggacctaaggacatatctggacaaggcacccccaccaggcttgccagccgaaacgatcaaggtgagtggggttggtaggcattgagaggtggattgggacctttgtagtagaaccttctgggatttcaggtatggtgcctagtttccagtgcatctgtacctccccctttgaaactaggatctgatgcgccagtttctaagaggcctagatttccttcatgccaattgcatcgttcaccgagatctgaagccagagaacattctggtgacaagtggtggaacagtcaagctggctgactttggcctggccagaatctacagctaccagatggcacttacacccgtggtcagtagaaagatggtaccaaaatgggttctggttgggaataggagagtgattgcccgtagcaattgagaagtcatgtgcttcatgtgttcagtcaagcaagttgtgtttcatggtaacccatggggtccccatccattcttcctattccctttaggttgttacactctggtaccgagctcccgaagttcttctgcagtccacatatgcaacacctgtggacatgtggagtgttggctgtatctttgcagagatgtttcgtcgaaagtatgggacccacataccctggactaccttgaattccccaaatcgcttgttcataaaccacatccataccttgcccattctttttttttgagaccagggcttgctgtgttgcccaggctggattgcaatggcatgatcacagctcactgcagcttcaacctcctgggctcaagtgatcctcccatctcagcttcccaactagctgacactacaggcacgcacctccatgcttggctagtttgttaatatttttatagagatggggtctcagtatattgcccaggctggtcttgaactcttgcactcaagcaatcctcccacccctacctcccaaagtagcataagctactgcatctggccccattcttttacttgcgtactactaacttgcccatagcagaaagctctgaaatgttctggaattaggaacttcatatccctttattctctttattttttatttatttatttatttatttatttatttattgagataaggtttcactctgnnacccaggctggagtncagtggcccaattanagctcactgtancctctacctcctgggctaaagmaatcctcccatctcagccccttgagtanctgagactaaaggtgcacgccaccatgactggctttttttttttttagatggagtcttgctctgtcgccaggctggagtgcagtagtgcgatctctgctcactgcaacctccacctcccagattcaagcaattctcttgactcagcctcccaagtagctgggaccacaggtgcacgccaccatgctcagctaatttttgtacttttagtaatgacaggtttcaccatgttggccaggatggtctcgatctcttgacctcatgatccacccacatcagactcccaaagtgctaggattacaggcgtgagcnnnngcacctggcatttctttttttttaaaaaaagagacaaggtcttgcttgcccaggctgatctagaactcctgggctcaagcagtcctctcacctcagcatcccaaagtgctggaattgttggcctttattccctatacttcctattttgagccactaagcagtaaccattcaactaagatatctttgaaaatgactgctaccttatatcccttctcaccttaggcctctcttctgtggaaactctgaagccgaccagttgggcaaaatctttgagtaagtgaccaacatgggagaaaaagattttctattctgagtcctctttctgctgaacccaggatggcaactggctctgccatggggatgggaactggaggaccctcctgaccagagttctcctgtcccccacagcctgattgggctgcctccagaggatgactggcctcgagatgtatccctgccccgtggagcctttccccccagagggccccgcccagtgcagtcggtggtacctgagatggaggagtcgggagcacagctgctgctggtaactggagatggctgtgggcacagggaaagaaatagagactggggaaagaaatagagcagtatgcagggccctggccactgtggttaatgaaacttggttggtagatggtctgtagtttttattacagctgcaaatagccacccacagagaaggatatagaagagaacccatcctggctgggcacggtggctcacgcctgtaatcccagcactttgggaggccaaggtgggcgtatcacctgaggtcaggagttcgagaccagcctggccaacatggtgaaacctcgtctctactaaaagtacaaaaataagccgggggtggtggcacacgcctgtaatctcagctacttgggaggctgagataggagaatcacttcaactcaggaggcggaggttgcagtgagctgagatcataccattggcactccagcctgggtgatagagcgagactccgtctncaaaaaaaaaaaaaaagaaaaaagaagaaagctcatcccaggtattgttgtgggtggcagaagctgttttcttcatggttttctgacctttgcctctcccctcaggaaatgctgacttttaacccacacaagcgaatctctgcctttcgagctctgcagcactcttatctacataaggatgaaggtaatccggagtgagcaatggagtggctgccatggaaggaagaaaagctgccatttcccttctggacactgagagggcaatctttgcctttatctctgaggctatggagggtcctcctccatctttctacagagattactttgctgccttaatgacattcccctcccacctctccttttgaggcttctccttctccttcccatttctctacactaaggggtatgttccctcttgtccctttccctacctttatatttggggtccttttttatacaggaaaaacaaaaccaaaagaaawaatggcccttttttttttttt

SEQ ID NO: 1044 - DNA, 783 bp, Homo sapiens
ggcacgagcgagttcctgtctctctgccaacgccgcccggatggcttcccaaaaccgcgacccagccgccactagcgtcgccgccgcccgtaaaggagctgagccgagcgggggcgccgcccggggtccggtgggcaaaaggctacagcaggagctgatgaccctcatgatgtctggcgataaagggatttctgccttccctgaatcagacaaccttttcaaatgggtagggaccatccatggagcagctggaacagtatatgaagacctgaggtataagctctcgctagagttccccagtggctacccttacaatgcgcccacagtgaagttcctcacgccctgctatcaccccaacgtggacacccagggtaacatatgcctggacatcctgaaggaaaagtggtctgccctgtatgatgtcaggaccattctgctctccatccagagccttctaggagaacccaacattgatagtcccttgaacacacatgctgccgagctctggaaaaaccccacagcttttaagaagtacctgcaagaaacctactcaaagcaggtcaccagccaggagccctgacccaggctgcccagcctgtccttgtgtcgtctttttaatttttccttagatggtctgtcctttttgtgatttctgtataggactctttatcttgagctgtggtatttttgttttgtttttgtcttttaaattaagcctcggttgagcccttgtatattaaataaatgcatttttgtccttttttaaaaaaaaaaaaaaaaaaa

SEQ ID NO: 1045 - DNA, 518 bp, Homo sapiens
  misc_feature (1)...(518): n=a,t,g or c
cttgggatgacatggccactgttttcagtattttaccagtacctggagcaatcaaagtatcgtgttatgaacaaagatcaatggtacaatgtattagaattcagcagaacagtccatgctgatcttagtaactatgatgaagatggtgcttggcctgttcttcttgatgaatttgttgagtggcaaaaagtccgtcagacatcatagcaagaactatgtgaagaaaatgcaaacctttcaattcccacgtgtatacaagctaatgtgatgagggggaaaaaaatccaacgggtgcattttcattcatatgaaagacttctcatagtacttttttttcatttttttaaaggaggttttcttgttacatgtgatgggcattgagccacacctcttcttagactgaatattgaagtttttgttttgagttatgtttataacatttattncagaccaataaagatccagatttgtgccaaaggcaaaaaaaaaaaaaaaaaaattgcggcgnaagccttatn

SEQ ID NO: 1046 - DNA, 657 bp, Homo sapiens
  misc_feature (1)...(657): n=a,t,g or c
tnnnntatctaggatgtggttctgttcatgctgctttctgcgatgtgcgtgtctgttagaataggctctctacccagctagaacaccttcgcagacacttgctggacagctatcttccacatacttcccagtttacatttggtcttaatgatcttgaatagatcctctcttcattttactcagccaggtttggtactgatgtacaggtgtnaaattacttcaagcatttnggnaagaggtgtatataattcaataaaaaaggtaaaacatgaacggaattcagcttggacttaaccaggntgaacttgnnggggggggtnanncagnntganctngtannggggnnnnnnnnnnnnnnnnnnnnnnnnnnnnnnnnnnnnnnnnnnnnnnnnnnnnnnnnnnnnnnnnnnnnnnnnnnnnnnnnnnnnnnnnnnnnnnnnnnnnnnnnnnnnnnnnnnnnnnnnnnnnnnnnnnnnnnnnncnnnnnnnnnnnnnnnnnnnnnnnnnnnnnnnnnncnnnnnnnnnnnnnnnnnnnnnnnnnnnnnnnnnnnnnnnnnnnnnnnnnnnnnnnnnnnnnnnnnnnnnnnnnnnnnnnnnnnnnnnnnnnnnnnnnnncnnnnnnnnnnncnnnnnnnnnnnnnnnnnnnnnnnnnccc

SEQ ID NO: 1047 - DNA, 416 bp, Homo sapiens
cttggacacgaacaaagccacacttctaactgcttctggcgaactgattttatttttaatttttttcaataaagatattcttagatactgaaagaaatagttaatgagtttgcatttgtgcttgagaaaatttggctcaagtccatttggctgtagtgtcaacgatgtttccagtagtgtttagatttggtgtcttcaaaggtagttgattaaaaccaagtgtgtctttaatatcttgtatcagaataactttgtatgttaccaacttaaattgctagaataaggtaaattgatacacaactgctatttttaatttagaactttgacctaatttgggttttcaaaaccattttggctacttgtattctttatgctgttgtttatttcaataaaaaattcacacctaaaaaaaaaaa

SEQ ID NO: 1048 - DNA, 564 bp, Homo sapiens
  misc_feature (1)...(564): n=a,t,g or c
tgtagattgccagcttgctgatcgttaacaacattggaaaatacagatctgcaggagcatgtacagctgcagcattcctgaaagaattcgtaactcatcctaagtgggcacatttagacatagcaggcgtgatgaccaacaaagatgaagttccctatctacggaaaggcatgactgggaggcccacaaggactctcattgagttcttacttcgtttcagtcaagacaatgcttagttcagatactcaaaaatgtcttcactctgtcttaaattggacagttgaacttaaaaggtttttgaataaatggatgaaaatcttttaacggagacaaaggatggtatttaaaaatgtagaacacaatngaaatttgtatgccttgatttttttttcatttcacacaaagatttataaaggtaaagttaatatcttacttgataaggatttttaagatactctataaatggnttaaaatttttagaacttcctaatcacttttcagagtatatggttttccattgagaagccaaantggtacncagattggtgagccagggaancatgg

SEQ ID NO: 1049 - DNA, 470 bp, Homo sapiens
cgaaaaaaggaacaaagcgttactgaaaagaaggtaacctttgttggatgtgggccttagctccaggtccagactactactctatgttctccagaagggtgctaagtcacctactgaagagagaaccaactgactttcctattgactcatcaggaaccagtcctcagtctggtcaagttgtttcttatttgtgagcagttcaggctatctcctgatggggatgaggccaaggctttcttatcttttggttgtctctgcttaatggaggagcctggcctaggatggaggcctggcttagatctttcattccacctcaggaatgaggttgtgatctttcctgtcctgaccctctctgaattatgtttcaatagtactcttgattgtctgccatgttgttgaagcaaatgaattatttttaaatgttaagtaagtaaataaaccttagcccgtcaaaaaaaaaaaaaaaaaaa

SEQ ID NO: 1050 - DNA, 459 bp, Homo sapiens
ttttttattatgtaaatgcctttatttgaactactacattgctaccagattacatcacttttcagagttagagtaacataataccttggaaactatagcaaacagcttgacaaagcaagagtacattaattcctacatatatacttttatttttagtgaccacatttctttgtttcaggtgtaaaattaaaaaatatattgtacacttagcatacttggcctaccaaatcccgtctaagttctgagcacactctctcctcaaaagtatcatattcaacagcattttaaatttagagagagagtttgatgatacaggttttaaaacaaataagcatgtattgaaccaagtgatttaagacaaaatatttcaattgtttacagcttgggtatgagagggaagatgcaaatttaaggtacatttttcctctagctacgatggtatgttttacttacctggat

SEQ ID NO: 1051 - DNA, 304 bp, Homo sapiens
  misc_feature (1)...(304): n=a,t,g or c
cacttatagccaatatttaataatcccatattaactgatgtgtaaaaaatgtctttatgatctgttaccacccaaaagaatgcatcataactttcaagantatgttctttgacttctaacctctgctcttctttagaattacctttgctgcggccagtacatgctccttgttaatgactctacatttactcgcacaagcgtttgtcctggactcttctgctaatcgatgaacaaacagtaaacagttcagatggaccaataagtcaccacttttctccagaccgaagttggagggcttctttcc

SEQ ID NO: 1052 - DNA, 1295 bp, Homo sapiens
caatgaagctgaggaacccagaactgcatctgggctgcgcgcttgcgcttcgcttcctggccctcgtttcctgggacatccctggggctagagcactggacaatggattggcaaggacgtctaccatgggctggctgcactgggagcgcttcatgtgcaaccttgactgccaggaagagccagattcctgcatcagtgagaagctcttcatggagatggcagagctcatggtctcagaaggctggaaggatgcaggttatgagtacctctgcattgatgactgttggatggctccccaaagagattcagaaggcagacttcaggcagaccctcagcgctttcctcatgggattcgccagctagctaattatgttcacagcaaaggactgaagctagggatttatgcagatgttggaaataaaacctgcgcaggcttccctgggagttttggatactacgacattgatgcccagacctttgctgactggggagtagatctgctaaaatttgatggttgttactgtgacagtttggaaaatttggcagatggttataagcacatgtccttggccctgaataggactggcagaagcattgtgtactcctgtgagtggcctctttatatgtggccctttcaaaagcccaattatacagaaatccgacagtactgcaatcactggcgaaattttgctgacattgatgattcctggaaaagtataaagagtatcttggactggacatcttttaaccaggagagaattgttgatgttgctggaccagggggttggaatgacccagatatgttagtgattggcaactttggcctcagctggaatcagcaagtaactcagatggccctctgggctatcatggctgctcctttattcatgtctaatgacctccgacacatcagccctcaagccaaagctctccttcaggataaggacgtaattgccatcaatcaggaccccttgggcaagcaagggtaccagcttagacagggagacaactttgaagtgtgggaacgacctctctcaggcttagcctgggctgtagctatgataaaccggcaggagattggtggacctcgctcttataccatcgcagttgcttccctgggtaaaggagtggcctgtaatcctgcctgcttcatcacacagctcctccctgtgaaaaggaagctagggttctatgaatggacttcaaggttaagaagtcacataaatcccacaggcactgttttgcttcagctagaaaatacaatgcagatgtcattaaaagacttactttaaaaa

SEQ ID NO: 1053 - DNA, 732 bp, Homo sapiens
tgctgcgaaccacgtgggtcccgggcgcgtttcgggtgctggcggctgcagccggagttcaaacctaagcagctggaaggaaccatggccaactgtgagcgtaccttcattgcgatcaaaccagatggggtccagcggggtcttgtgggagagattatcaagcgttttgagcagaaaggattccgccttgttggtctgaaattcatgcaagcttccgaagatcttctcaaggaacactacgttgacctgaaggaccgtccattctttgccggcctggtgaaatacatgcactcagggccggtagttgccatggtctgggaggggctgaatgtggtgaagacgggccgagtcatgctcggggagaccaaccctgcagactccaagcctgggaccatccgtggagacttctgcatacaagttggcaggaacattatacatggcagtgattctgtggagagtgcagagaaggagatcggcttgtggtttcaccctgaggaactggtagattacacgagctgtgctcagaactggatctatgaatgacaggagggcagaccacattgcttttcacatccatttcccctccttcccatgggcagaggaccaggctgtaggaaatctagttatttacaggaacttcatcataatttggagggaagctcttggagctgtgagttctccctgtacagtgttaccatccccgaccatctgattaaaatgcttcctcccagc

SEQ ID NO: 1054 - DNA, 1895 bp, Homo sapiens; identical to SEQ ID NO: 515

SEQ ID NO: 1055 - DNA, 717 bp, Homo sapiens
agagcgatcatgtcgcacaaacaaatttactattcggacaaatacgacgacgaggagtttgagtatcgacatgtcatgctgcccaaggacatagccaagctggtccctaaaacccatctgatgtctgaatctgaatggaggaatcttggcgttcagcagagtcagggatgggtccattatatgatccatgaaccagaacctcacatcttgctgttccggcgcccactacccaagaaaccaaagaaatgaagctggcaagctacttttcagcctcaagctttacacagctgtccttacttcctaacatctttctgataacattattatgttgccttcttgtttctcactttgatatttaaaagatgttcaatacactgtttgaatgtgctggtaactgctttgcttcttgagtagagccaccaccaccatagcccagccagatgagtgctctgtggacccacagcctaagctgagtgtgaccccagaagccacgatgtgctctgtatccagaacacacttggcagatggaggaagcatctgagtttgagaccatggctgttacagggatcatgtaaacttgctgtttttgttttttctgccgggtgttgtatgtgtggtgacttgcggatttatgtttcagtgtactggaaactttccattttattcaagaaatctgttcatgttaaaagccttgattaaagaggaagtttttataat

SEQ ID NO: 1056 - DNA, 627 bp, Homo sapiens
agtctccggcgagttgttgcctgggctggacgtggttttgtctgctgcgcccgctcttcgcgctctcgtttcattttctgcagcgcgccacgaggatggcccacaagcagatctactactcggacaagtacttcgacgaacactacgagtaccggcatgttatgttacccagagaactttccaaacaagtacctaaaactcatctgatgtctgaagaggagtggaggagacttggtgtccaacagagtctaggctgggttcattacatgattcatgagccagaaccacatattcttctctttagacgacctcttccaaaagatcaacaaaaatgaagtttatctggggatcgtcaaatctttttcaaatttaatgtatatgtgtatataaggtagtattcagtgaatacttgagaaatgtacaaatctttcatccatacctgtgcatgagctgtattcttcacagcaacagagctcagttaaatgcaactgcaagtaggttactgtaagatgtttaagataaaagttcttccagtcagtttttctcttaagtgcctgtttgagtttactgaaacagtttacttttgttcaataaagtttgtatgttgcatttaaaaaaaaaaaaaaa

SEQ ID NO: 1057 - DNA, 2824 bp, Homo sapiens
gcggccgctttcgatttcgctttcccctaaatggctgagcttctcgccagcgcaggatcagcctgttcctgggactttccgagagccccgccctcgttccctcccccagccgccagtaggggaggactcggcggtacccggagcttcaggccccaccggggcgcggagagtcccagacccggccgggaccgggacggcgtccgagtgccaatggctagctctaggtgtcccgctccccgcgggtgccgctgcctccccggagcttctctcgcatggctggggacagtactgctacttctcgccgactgggtgctgctccggaccgcgctgccccgcatattctccctgctggtgcccaccgcgctgccactgctccgggtctgggcggtgggcctgagccgctgggccgtgctctggctgggggcctgcggggtcctcagggcaacggttggctccaagagcgaaaacgcaggtgcccagggctggctggctgctttgaagccattagctgcggcactgggcttggccctgccgggacttgccttgttccgagagctgatctcatggggagcccccgggtccgcggatagcaccaggctactgcactggggaagtcaccctaccgccttcgttgtcagttatgcagcggcactgcccgcagcagccctgtggcacaaactcgggagcctctgggtgcccggcggtcagggcggctctggaaaccctgtgcgtcggcttctaggctgcctgggctcggagacgcgccgcctctcgctgttcctggtcctggtggtcctctcctctcttggggagatggccattccattctttacgggccgcctcactgactggattctacaagatggctcagccgataccttcactcgaaacttaactctcatgtccattctcaccatagccagtgcagtgctggagttcgtgggtgacgggatctataacaacaccatgggccacgtgcacagccacttgcagggagaggtgtttggggctgtcctgcgccaggagacggagtttttccaacagaaccagacaggtaacatcatgtctcgggtaacagaggacacgtccaccctgagtgattctctgagtgagaatctgagcttatttctgtggtacctggtgcgaggcctatgtctcttggggatcatgctctggggatcagtgtccctcaccatggtcaccctgatcaccctgcctctgcttttccttctgcccaagaaggtgggaaaatggtaccagttgctggaagtgcaggtgcgggaatctctggcaaagtccagccaggtggccattgaggctctgtcggccatgcctacagttcgaagctttgccaacgaggagggcgaagcccagaagtttagggaaaagctgcaagaaataaagacactcaaccagaaggaggctgtggcctatgcagtcaactcctggaccactagtatttcaggtatgctgctgaaagtgggaatcctctacattggtgggcagctggtgaccagtggggctgtaagcagtgggaaccttgtcacatttgttctctaccagatgcagttcacccaggctgtggaggtactgctctccatctaccccagagtacagaaggctgtgggctcctcagagaaaatatttgagtacctggaccgcacccctcgctgcccacccagtggtctgttgactcccttacacttggagggccttgtccagttccaagatgtctcctttgcctacccaaaccgcccagatgtcttagtgctacaggggctgacattcaccctacgccctggcgaggtgacggcgctggtgggacccaatgggtctgggaagagcacagtggctgccctgctgcagaatctgtaccagcccaccgggggacagctgctgttggatgggaagccccttccccaatatgagcaccgctacctgcacaggcaggtggctgcagtgggacaagagccacaggtatttggaagaagtcttcaagaaaatattgcctatggcctgacccagaagccaactatggaggaaatcacagctgctgcagtaaagtctggggcccatagtttcatctctggactccctcagggctatgacacagaggtagacgaggctgggagccagctgtcagggggtcagcgacaggcagtggcgttggcccgagcattgatccggaaaccgtgtgtacttatcctggatgatgccaccagtgccctggatgcaaacagccagttacaggtggagcagctcctgtacgaaagccctgagcggtactcccgctcagtgcttctcatcacccagcacctcagcctggtggagcaggctgaccacatcctctttctggaaggaggcgctatccgggaggggggaacccaccagcagctcatggagaaaaaggggtgctactgggccatggtgcaggctcctgcagatgctccagaatgaaagccttctcagacctgcgcactccatctccctcccttttcttctctctgtggtggagaaccacagctgcagagtagcagctgcctccaggatgagttacttgaaatttgccttgagtgtgttacctcctttccaagctcctcgtgataatgcagacttcctggagtacaaacacaggatttgtaattcctactgtaacggagtttagagccagggctgatgctttggtgtggccagcactctgaaactgagaaatgttcagaatgtacggaaagatgatcagctattttcaacataactgaaggcatatgctggcccataaacaccctgtaggttcttgatatttataataaaattggtgttttgt

SEQ ID NO: 1058 - DNA, 439 bp, Homo sapiens
ggtgggtctgaatctagcaccatgacggaactagagacagccatgggcatgatcatagacgtcttttcccgatattcgggcagcgagggcagcacgcagaccctgaccaagggggagctcaaggtgctgatggagaaggagctaccaggcttcctgcagagtggaaaagacaaggatgccgtggataaattgctcaaggacctggacgccaatggagatgcccaggtggacttcagtgagttcatcgtgttcgtggctgcaatcacgtctgcctgtcacaagtactttgagaaggcaggactcaaatgatgccctggagatgtcacagattcctgcagagccatggtcccaggcttcccaaaagtgtttgttggcaattattcccctaggctgagcctgctcatgtacctctgattaataaatgcttatgaaaaaaaaa

SEQ ID NO: 1059 - DNA, 6004 bp, Homo sapiens
  misc_feature (1)...(6004): n=a,t,g or c
aagcttgggaaactgggcaactttttctttatttttgtttttatttattattattttggagatggagtttagctctttcgccccaggctacagtgaagtggcttgatcttggcctcactgcagcctctgcccatcccggttcaagtgattctctgccctcagcctcccgagtagctgggattataggtgcctgccacatgcccggctaatttttttgtatttttagtagagaggagtttctccatgttggtcaggctggttttgaactcctgacctcaggtgatccacctgtcttggcctcccaaagtactaagattacaggtgtgagccaccgtgcctggccaacttattttttttctgagttcagtcttctagactatcggttaatacttttgaagttttgtcagttaccagaatatcagatatattcatatgcaaccagtggttttggtatgctgccattttgttaatctgtaccacattccacatttgtgcttataaggatgcatatcctattttaaacccgtagaataagagaagtgagattttgacccagttgatttagttgatgtgactaatctagaattatattctgtattactacagaataaaaggattacagctccttaaagtatacccttagttcagtcgtagagaaaactgcccatcaagacaggaagagctgggctgccttggagaagaacaatgactttattcccaaatggaggcgtagaagaaggagggtagaagtcaaaggaaatttctattcagggaaaagaaaaagctaacagaaagatgtatttttctttccttaacaagatagtaaacgtgagagtgggaatcctctaattctattcagggaaaagaaaaagctaacagagaaagtagtatttctttcctaacaaagatagtacagtgagtggggaaatccctctaacacgattcattaaaaaatgtgaactacgcagctggaggccattatcctaagcgaattaacccaggaacagaaaaccaaatagcccacatgtctcacttgcaagtggaagctaaacatggagtacttatggatataaaaatggcagcaacagacactgaggacagagcgggagggagaagaggggggttgaaactgttgtatacatgctcgctaccttggtgatggctacaattgcaccagacctcagctacatatgaaccgtgtacaactgtgctgtaccttgattaataattgaccggccannnnnnnnnnnnnnnnnnnnnnnnnnnnnnnnnnnnnnnnnaaatccgctgctcgggagctaggcaggagaaatgctgacctgggagggcagaggttgcagtgacccgagatcatggcattgcaactccgccctggggccaccaagagtgaaactccgtcttcaaaagggcaaaaaaacgaaaaaaaaaaaaaaaaaaaaaaaaaaaaagttgaagttataaaaaacaaaaacgtgaattaaaattgtgaaacttagatccaggtgtcgcattctgatgttgtctaatttcttgggccctatgacaaatatattttaatacatgtaatataacatgttactgataattattgaaactctgttcatttgtgggtgttttttaggattttttttttttaataggggagttgctggaagccatcaaacgtgactttggttcctttgacaagtttaaggagaagctgacggctgcatctgttggtgtccaaggctcaggttggggttggcttggtttcaataaggaacggggacacttacaaattgctgcttgtccaaatcaggatccactgcaaggaacaacaggttagatttaaaaattgtgatttcatttgggagagatgctctactgtaaagcattcaactagaaataaggaaaactaacagtgttttaagaacatgtaataatttgcaaatcttaacagataacacccagagtcttgtgtaagaaaaatgttttagaagtctgatatttcataaaattaagtacacgtaattttataggtacattaacaaacatgtttatttttatttattttttttgagacagactctactgttggcccccaggctggagtgcagtggtgcgatctcggnnnnnnnnnnnnnnnnnnnnnnnnnngttaattttcccagtctattttattgttagtatttgtcacattttctttgtaaacagtgaattaaaatattttataggtattcattcttatctagatttcctacttatataaaaaaacaagtgaatgagattgttacaaagggtaattttgtgtgagtagaataataaaagttgaaattgagaagatgcaatgttttagactgaaactgtggttggtttgttttccccttctttctaacaggccttattccactgctgggaattgatgtgtgggagcacgcttactaccttcagtataaaaatgtcaggcctgattatctaaaagctatttggaatgtaatcaactgggagaatgtaactgaaagatacatggcttgcaaaaagtaaaccacgatcgttatgctgagtatgttaagctgctctttatgactgtttttgtagtggtatagagtactgcagaatacagtaagctgctctattgtagcatttcttgatgttgcttagtcacttatttcataaaccaacttaatgttctgaataatttcttactaaacattttgttattgggcaagtgattgaaaatagtaaatgctttggtggattgaatctgattgggacatttcttcagagagctaaattacaattgcatttataaaaccatcaaaaatattccatccatatacttntggggacttgtagggatgcctttctagtcctatttattgagttatagaaaatctagtcttttgccccagttacttaaaaataaaatattaacactttcccaagggaaacactcggcttttctatagaaaattgcactttttgtcataatcctctgcagtgatacttctggtagatgtcacccagtggtttttgttaggtcaatgttcctgtatatagtttttgcaaatagagctgtatactgtttaaatgtagcaggtgaactgaactggggtttgcctcacctgcacagtaaaggcaaacttcaacagcaaaactgcaaaaaggtggtttttgcagtaggagaaaggaggatgtttatttgcagggcgccaagcaaggagaattgggcagctcatgcttgagcccaatctccatgatgcctacaagctagagtatttaaaggcagtggtaaatttcaggaaagcagaagttaaaggcaaaattgtaaatcagtcgagatcgggtgccttcagggtggtatggctagtataccaaaattgtaaatcactacatgaagcttatatattggtttggcctgaaaggtgaagtgggtaggcagggggcgggcttacaggttatggtggattcaaagactccctgatttgtgattggttaaggaagcaagctttgtctaaaaacttggggtccgcagaaaggaacattaaggtctggccaggcccctcaggaaagaaactgagagcaaagaatggaggtcagatttagtccctggtgttcccccttatctgacgtctgtgtgaatccatttggtgggggtctgggtttctgaaaagtagctcaggggcacgtgttaaggatgtctctaggtgactctaacttccctggctattgtttgaaactgttatgaccttcttgcttatcagcttgctggtttccttctcggggcgagctgggtgcctggagttttcggtgaaggaaactcaagattctcctttatttctgtgcttgtgggaatccccctgctcccaaagaggggtccctgactccgtctcacagggatctttttgtatatttggcttagcatcatacatttgccatgttgtttcatcatcttgcctaatttactgtttttgaatatttcatttgtttctaattgttactacagataatgctggggtgagcaactctgtgtacataggtttatctcctattggaatattttctttatataggcgttttttttttttctttttttttggagacagagcttgctctgttgcccaggctggagtgcaggtggccgcgacctggagctccactgcaacctccacttcccgggtccaagtgatgtcccaacctcagcctcctgaatagctgggattataggtgcatgctaccatgcctggctactttttgtatttttagcagagacagggtttcaccatgttggccagggtggtctcgaactcctgacctcaagtgatccgtctggctcagcctcccaaagtgctgggattacaggtgtgagccactgcacctggcctatataggcttttttcttaaacctatttagtaatgttttccaagtttcccaagttattttttattttaattttccccagttatttttctatttttttttcatggaaaaatggggtaacttagcagtttcaatattgaagactgaagtttaaaaaaatttaaattcaaggtacttttaaaattcagttagaaaagtaggctttaaaaattattagagacaagagtaccaaagcggtgtgtgtatgtgtgtgtgtgtatgcatgcttgtggattggaaaaactttggagactgattacttttcattatatatgtgtcacagtgaaacagcttttatgtgtcatgtaagattactgcttgcctctctaaggaaggtcgtgactgtttaaatagacgggcaaggtggaaccttttgaaagatgagcttttgaatataagttgtctgctagatcatggtttgtattgaactaacaaggtttgcagatctgctgacttatataaagctttttgattcctactaagctttaagatttaaaaaatgttcaatgttgaaatttctgtggggctctatttttgctttggctttctggtgagagagtgaggaagcattctttccttcactaagttttgtctttcttgtcttctggatagattgaattttaagagactaagggaatttacaaactaaggaatttagtcatctggtggaaaaggagactttaagattgttagggctgggcggggtgactcacatctgttaatcccctttgggcggccaaggcggcagaacacttgaaggagttcaagaccagcgtggccaacgtggtgaaaccctgtctctactaaaaaatacaaaattgtttagctctgtttttcataatagaaatagaaaaggtaaaattgcttttcttctgaaaagaacaagtattgttcatccaagaagggtttttgtgactgaatcagcagtgcctgcccatgtcatagctgtgcttcaaaaacctcagcatgattagttgtttggagcaaacaaggaagcaaagcaatacgtttttgaaattctatctgttgcttgactatattgtaataattaacattgaagttgagaaattcacaactttaattgtacacttcattgcaacttgaaattcatggtcttaaagtgagatttgaatttctattgagcgcctttaaaaaagtaataccaaaccataaagttaaaatctatgtatattgagtcatatctaaaaccacgtataaacataaattgtatttcctgttttaattccaggggaagtactgtttgggaaagctattattaggtaaatgttttacaaattactgtttctcactttcagtcaataccctaatgatcccagcaagataatgtcctgtcttctaagaggtgcatcaagcctggtacatactgaaaaccctataaggtcctggataatttttgtttgattattcattgaagaaacatttattttccaattgtgtgagtttttgactgttaataaaagaatctgtcaaccatcaaagaggtctgcattatgcttgcatgtcaaaaacattaaaaatcctataaatctactgtcattttcactgaagtttccaagggaaaggaattgtaattttgggctgttg

SEQ ID NO: 1060 - DNA, 66109 bp, Homo sapiens
  misc_feature (1)...(66109): n=a,t,g or c
tcgacgggatcacgaggtcaggagatcgagaccatcctgactaccacggtgaaaccccgtctctactaaaaaaaatacaaaaaactagccaggcatggtggcgggcgcctgtagttccagctactcgggaggctgaggagggagaatggcgtgaacccgggaggcggagcttgcagtgagccgagattgtgccactgcactccagcctgggcgacagagcgagactccgtctcaaaaaaaaaaaaaaaaaaaaaaaaaaaaaaaaaaaaaaagaaaaggattgtaagagttactgttacattttctggcctactacctttaaaattcctgttgcatttctttgtatttacaaggaaaagactgaactttttctcatcaaaactagcttttttctcacaggttaaacttgcaccaatgtctgctctttttttttaatgtttttggtactctgggcagacttcagttttttaaaaaataaagattctaatgcagctatcttggcattccctttaaatacctgtcttaacctcctacttttatttcctactcctttccacacacatgcatacaatcctttaccttttaaagaatcattaagactgtcacacattaggaactctttcgctcactcttctgtcatttgctgcaatattgaaattcttattttgaccatcaatgcctattaattcttctaatacatgaagaaaatgattgagtagcagcagtactataggtgggaaatacagtttaactgctgaatttttatacctctctgatttatagcttgctaattaaattgctattaatagtttgtttggcttaattagacttaagaaaacaacaggttttttttttttgaggtttttttttttttttttgcatgaggagagaattgtatgtaaccagtgatatgattattcctgaatgtacagacagaagtaagcctggacattgtttaatttaaaaactttagtccctgctttaagggaatatgataatgtatactatgacaaatgtactttattcttctaacacagtaagaattacttggaactttttcctgaaactaagtgcaggaaagccctgtgtgtcttggtttagtgatggtttcatttctagccatacaactgatggattgtatacaatttttgttagtgccaaaataatctgttatatgaacagacttctaaaataatttctgtatattatatatgtaagaaggcttttattgaacagcttattttccacttgcaagtttatggaaatatcaatatgtcaaaataaaaagtgggacaattctttgctgttagaagaatgtgcttattattttgatttcttaaatggtacataatcaaagtactgctgaactataggtgcagtattctactaaacatttcagctagtaataccactgatttagaaacaaaactgtttatttttgctttctgaatttagaatgctgggattacctgtttaaatatgttttagggaatatagagattaaatctgtacatacctgtgcacatatattcatgcaccctctgattttggttttctcgtttttgagttcttagaaagtatccacatactcttcttttagtagaagtagctgttttagagagaagaaaaggatgagactttaaatagttgattctttttgtgttttctacaaacttttttgaattttaaatcacaagcaaactaattttctggtttttagaaagtagatgatgatttcagaggagtaagacatgccaaacagcgtgctcggtaggattttaggtagtcaaatgcagctgagaaaaagtattttcaagtcataagttgctaattgatatgctatgaactagtcaaaataggaaccatatgattcatgttagattttcctctagagatggatctgaatgttcagttccagccaaggtagattttactttcaactttttaatcaatatcactttctgtgcttaatctctttggtgttaccttgtccattttcatttgtctaaaattctgcagggatgactacaatttggcataatggtataaatgaattgttaagggtaactttaagttgaagattaaagcaagatgccattttccccatgtctttcattttgtttacattttttccctttaagttagtatacactacacatactacaataaaatataataatatgaaaaaagaatattttagatattctagtccctttgcctttccatgtaaattttagagtaatcctacctataattaacaaatcttgcaaagattttgattggaattgtgttaaacttgtatattggtttggggagaattgacatatttactatattgaatcttccaatccatgaacagtatttctctccacatagatagagactgaatagatcttctttgatatcgttcaccagcattacatagtttttagcttgcaagtcttgcatgttttgttagatttacacataagtgtttcatgtatttgagtaattgtaaataatatatttatatttttgggccaggcgcggtggctcacgcctgtaatcccagcactttgggaggccaaggtgggcggatcacaaggtcaggagatcgagaccatcctggctaacacggtgaaaccccgtctctactaaaaatacaaaaaattagccgggcatggtggtaggcgtctgtagtcccagctactccggaggcaggagaatggcgtgaaccccggaggcggagcttgtggtgagccgagatcgtgccactgcactccagcctgggcgacagagtgagactccgtctcaaaaaaaaaaaaaaaaaaagaaaaaaaaaaaatatatatatatgtatcatttgttcattgtgagtatgtagaaatacaattgatactggtttatcctgtattctgttaatttgctgaaatcacatatctagaagtttttctgtagcttccttgtgattttctacatagacaatcatgtcacttacaaatgggagctgtttatttcttacttcacaatctgtatgcctttaatctcctttttcatgcctattgcactgtctagaacttccaacactgtgaataagagtggtgagagtggacattcttgccttgttcctgattttaggtagaaactattcagtctttcagaatcaagtatgttcaccataggatttttgtagacgatctttatcaagtaaagaaagatctcctctactcctatatttctgagattaaaaaaaaataatgaatgggtgttaaagtgggttaaatactttttcttcatcaattgatatgaacaagtaaattttcctcttcagcctataatatgatggattacattaattaattgtgaatatccaaccagctttgcatccctgggataactctcacgtggtcattgtatataattctttttatatgttggtaaattccacttgctaatattttgttaaagattgctgcatcatgaggaatattagtctacagttttcttttcttcccattgtcattgtttggttttggtattgaggtaattctagctttataaaataaactgggaaatgcttcctctgcttctattttctggaagagattaattggtgttaattcttctttaaatctttggtagaattcttcattgaaactatttgttcctaaatatttccttttgtgagtttttaaattatgaattcaatttcctcaataggtgtagacatttttgaattattttatatttagtgagttgtggcactttatattttttgagaaaatgatccatttaatttaagtgtcaaatttatgtgtgtagaattgttcatagtattcttttgttatccttttgatgtctgtagaatctttgatgatatcccatttcatttctgatgttggtagcttctatcttctgtcgtctttttttctgagtcttgctagtggtttgccaattttattaatctttcaaagagccagctctttgcttcattgatttttttttgcttttgtttttctgttttcagtttcattgttctgcttgctttttattttgttattcttttactagattcttgaggtgagagtttagattattggtttgagacttttcctcttttccaatgtatgcagttagtgctttaaatttacttctcaaatgcaaatcaaaaccacaatgaaatgccatctcacgccagtcagaatggtgattattaaaactcaagaaacaacagatgctgacaaggttgtggagaaatagaaatgcttttacattgttgatggaatgtaaattagttcaaccattgtggaagacagtgtggcaattcctcaaagatctagaaccagaaataccatttgacccagcaatcccattactgagtatatacccaaaggaatacaaatcattctattataaagatacatgcacttgtatgttcattgcagtactattcacaatagcaaagacatggaatcaacccaactgcccatcaatgacagactggataaggaaaatgtacatatgcaccatggaatactatacagccataaaaaggaatgagatcctgttatttgcagagacatggatgaagctggaagccattatcctcatcaaactaatgcaggaacagaaaaccaaacaccacatgttctcacttataagtgggagctgaacaatgagaacacaaggacacagggaggggaaaaacacacactggggtctgtctggggcgaggttggagggagggagagcatcaggaaaaatagctaatgcatgcttgtcttaatacctaggtgatgggttgatatgtgcagcaaaccaccatggcacatgtttacctatgtaacaaacctgcacatcctgtacatgtatcctggaacttaaatttacctcttataactactataactgtatcccacaaattctgatatggcatattttcatttttgtttagttgtgtttattgtgtgtatttttaaaaaatttccttgagacttcctccttgacccatgtatttctaagtgtgttgttttgtctccaaatgtttagatattttcctgttgttgatttctggtttggttccattgtggtaggagaacactttctttatgattttatttaaaaaatttgttggtcttttattgtcttagatatggtctatcttggcatatattctgtgggcacttaaaaaaatgttattctggctgggtgcagtggctcatgcctgcaatcccagcactttgggaggctgaggtgggtggatcacctgaggtcaggagtttgagaccagcctgatcaacatggtgaaacctcatctatacaaaaaataaataaataaataaataaataaataaataaataaaaaattagccaggcatggtggtgtgtgcctgtaatctcagctactcaggaggctgaggcaggagaattgcttgaacctgggaggcagaggttgcaatgagccgagattgtgccattgtactccagtgtgggcaataagagtgaaactccatctcaaaaaaaaaaaaaaaaaaagtgtattctgccatggaatactatgcagccataaaaataatgagatcacgtcttttgcagggacatggatggagctggaggccattatccttagcaaactattgcaggtacagaaaaccaaatactgcatgttctcataagtgggggctaaatgatggacacatggacacaaagaggaaaaacacatactggggcctattggagggtggaggttgggaggaggcagagggtcaggaaaaataactaatgggtactagacttaattcctggatgatgaaataatctgtacaacaaacctccatgacactgtttacctatgtaacagacctgcacatgtacccctgaacttaaaataaaaggaaaaaaaagaaaaaagaaaaaggaaaatctcgtggaatctactaaaagcaacgaaaaagaaaataatgtatcttctgttgttgggtggtgtgttctataaatgttgattagatcttatggtttgatgttgtttattcttctatgttttttctcaatttttgtctatttgtttaatcaattgttgagagaaaactattgaagtcttcaactatcattgttgacttgcctattttcttttcagttctatcagtttttgctttacataatttgcagccctgttgtttggtgcatacatatttaagattgctatgtctttttggtagatttacccttttattattacatagtgttcctatccatttctagtaattttctttgttctaagtttatttgatattaatatagcctccctttattattttttgtctgatatatgtttttctatcctttaacttataaaccgcctatatcattatatttgaagtgagtttatcataaacagcaaataattgagtctttttttttttttttttgagacggagtctcgctctgttgcccaggctggagtgcagcggtgtgaagtggtgtgatctcagctcactgcaacctccacctcccgggttcaagagattctcctgcttcagcctcccgagtagctggggctacaggcttgtgccaccacagctggctaatttttgtacctttagtaaagatggagtttcaccatgttagccaggatggtcatctcctgaccttgtgatccacctgccttggcctcccaaagtgttgggattacaggcgtgagccaccgcacctgacagagtcatatttttaaatctattctgccaagctctgtctcttaaaattgatgtatttaggcgatttatatttcctataatattgttatgtccaggcttaagtctgacattttattttctgttttctgtttgttctctctgtttttcatttctttgttttctttttcattgcttcctaaataattttaaaattccattttaatttatctatagctgtgtgtgtgtatgtgtgtgtacctctttggatagctcttttagtggttgttctaggtattacattatatttatgtaacttatttattgtcattaattaccagtctgagtgatgtgtagaaatttcttctctctttgtttaccctccctcatttataattgcctgtaatattttctctatatacatttataaccatatgatacagtattatacgtttttcttcaatcctataatttaaataactcaagagaagaagtaaagtccattttttaacccatattttttcttgccatgttctttcttccttcctgatgttccaactgtcctcaatttaactttttgtttttttagggtagacctgttagtgacaaattctgttagttttccctcatctctgtatgtcttaatttccctggatatttttgctgatatagtgttctaagttgatatttttttttcctttcagcactggaaaaaggtggtgacctccttcgggcttacacagtttctgatgaaaattttgctctgtcatttttttcacctgttagatgtcatttatctcactgctttcaagattctttttatctttaatttttagttaattactatgattttggtgtggctttctttgggtttgtcctatttggggttcactcaccttcttaaatcactaggtttatgtcttctgccaaatttgggaagttttcaaccatatttatttgataatttttttcagcttcactctctttttcctctcattttgggactctgagtacatgaacattaaatcttttgttatagccccatgggtccctgaggctttgtccattttttccagtgtattttctttctttcttttgttcagattaagtgattgctattgctgtgtcttcaaggtagctaattctttcctctgttctctccttctgctgctgagcttatttactgggctttttattttggctattgcacttttcagttctaaaatttccacgttttcttccgtatatatcctatttttatgctgaaacatcctatttttttcttttctgctcttttcttcttctttctttttttaaaccactgaactggacatcctatttttttcattcttttaagtgttaattgctcatcaaagcattttaataatggtggctttaaaatcttcatcaggcttttctttccgttttggcatctattttattgtcttttaaaaattcaatttgagatattcctggttcctgatatgacaaataatttccaattgaaacttggacatttcaggcattatgttataaggctattggtcttatttaaactgttttagctggcttcttttaacacctctccagcaggtaggcaggtgagcttcatgacgccaggtaggggtaggagtccaggcttctcactctgccttcattgacacctcagataggtccccattattactgagtggggacagaaattctggctccctattaggtgcccactaatacctccctggttggttgggagaggagtgccacttactatccctcacatgacctttattgacaccaagatgggacagtggagtggaggagtgagtggtaggtatcagggagtggttgctggattaactctgggtggtgatgaaaatcctgactctccattaggcattgtctgacatcaccctagaggagaggggaagagatgcttcattactgttgggtgaggaatggaagtctaggtttccattgacatttcaggggcttggggaaaggagtacattttcaccaagagggcatgaccatcctgactccctattcactttctctgacaccatcctggtgtgtgtgcatgtgtgtgttgaagtgttgggttccttatgacagcctggtgagggtgaaagtctaggctcctcatttgaccttagctggtgggggtggagtcgcagttttttctgtggtgtttggctggccccattacccaagatggagtgtagtggtgcgatcatagctcactgtaacctcgaactcctgggctcaagtgatcctcctgcctcagccttcagagtatctaggactatgacacatcgaactatgcctgactaattttattattattattcatagagacagggtctcattatgttgcccagggctggtcttgaactcctggcctcaagcgatcctcctgcctggcctccttcccaaaattactttaaatgatataatagctgacagcttgaataggtcctctttattttgttggaggcagagtgttagaagtgacctaacaaaaaggatttgtttcttgtcactagactcattcactgtgtcaatgagtgtgtcagtggtttgtgggaagcaaacttaaatgaaaatgtatatttttaattaaatgttatgagatgctttttttaaactattggctcttgtgaatttcagaaaaatattgcaagtcatttgacttagctacttagcttgcactctatgtaaaaattttagaattttacctctttgaaaaactcctaatatcaatagtgatattgttgttttgcagcctcaaatgattttgttactttggactaattttcactgagctagttaataagtgactttttattgtctaaaaaattcttaagtgtatcatagagagaaagattattgggtcactaagtggctttctatatatatacctttgtccatatttaatttttgcaaaactcaaattaaggtggtaaacttagtgtggatatacattcatgtattgtattgataagattaactacgttttaaaactaaagtggaaagttttaaacaaaattgtcattcaactatatatgtatttctgtaaaacacacacgtaatgatgaattcgaattaataagcaaaaaaggagaggatttgtaatttaaaattgatcttggaatatacactctacacttaagacagagaaaaaactttttctttccctttagcataatctgcccagctagcggtggtttcttatcagaatgctctcacttaataccttgataacttttagtgctttgtgctgatagcatcaagtttttaaattattttaaaaacaaacaacaacaaaaaaccatttgcttctgaaacacctaaagtttcttataattgttaccttctttatgtttattttcaaatgttttattgtcactctggttattgagatatcaaagttataacaattgctcactctcaggtacctatgcacttaagtgaccagtttctctgaaaattcttttttgttgttgccttcttccaacctcataccctgaattcagaatactaacactgtcaagctatttttcacgcccccaaatctttgttttttctcactagacagccactacccatttggccactaggtggcgcaaaaggcttaatttttcaccttcctccgcctactgtgaaggaagctaaaagtaattagatgtgtttggcatgatttttatattttaaattaacgctgtactatcaaaagaactacctgtgtctcaaacccacaatgtggtaaaagctgacaaataaaaaacagtagctcaattttctagattaattttgtccaggttaaaaatattattgatatatgttttagtgaccacataggtttcagtaagggtaaaaggatgctcttgttcgtactccaagtctggcatggtgactgtcaatacattcattttgaagaagattttgcttctgggtttagccctaaaacaggccaaatagagacgataaaatgagtggaactgaattagagcatttctgaaaagttttatttggttaattctgccccttaaggtcagaaattgtgtaggaaaagtgtttcaaaattataaataaggcaaaattgtacgtgcttgattattttatatcacacttgaacctttgctcataattctgcctgatcaaaaccagagtgtttcagggattgtaatttgcctaagacgaacccggccagccctgtgcgattagaggttaatcagcagagagctgataagggatgctggctttctctttttctccggtaaagaagataacaccaaggttatgattttattgccctctagcacgttagccattttgaatctctagcctagaaattatttcctcacagagagatacagctctgtttttcaaatactctttggatcaaggctcttgtattcttgctggttccctctttgagtttgataaaactttgaaaagtctaccaaagaaatttctctcagaactagactttagagaggaaatgctggaactacggatgagaggcacatgtatgtacagggtcagaccacgcagagagcaggtctgatgagccacaccactgctgctgccccatggcttctagacgctgctgttggttctgttgttaggacctggaggttgctgcagccaccactgaagacacctcctaaaccacttctgtttcaggaacttcacttaaaaaaaaaaaaaaaaaaggaaaaaacccaccgcttccccaaaagacagttgcttcttctgtcacctttgccagagaaataaatacagtaaaaggtgctctgcaacccccacaccctggttcctcctgtggcccctttgtaactgaagtcttaggtggatgaatttaattggtggaacttaggtgctctagcttcaaagaaggctaggggaagtgagctttctggtttccactttagggaggcaggactcaaaaggtaggggaaatttcacagtactctaaaggtgttcaaatcccatgggcagccagtaaacatcacaggtgtgaggtgctgggtggagtggctgccgtgaatatgtgttttggttcatggactacatcagtggctcttaaagtccagtaattcacagattcatgagagataataaaatgattatttttgttttaagccattaagtttggagttggtgtgctgcccagcaatagataatggaaacatacagtatgtatttctgcaagtctggcttcttcacttaatattgtttctatgagattcgtccatgttgttacattttcagtagttgatgaagtttcattgtttacatagtactgtgttgcacgaatagactacgttttgtttatccatttactgttgaagaaccattttgttaaacaatttgagagtaatctgtggaaattatgccacttgacccctaaatattttgtcatgtataatttaagaataaggacatttctcctgcaaaaccctaatactgtcatcacccccaagatacttaaaattgataccatattatcaaacacacaatccatattaaaaaatcccctattgtcccagtaacaccttatagtaaatgtctgttattttaagcgggtgtcattcattacatggcaataggtaactaatacggtgagtctgcttcttccagcaaggaccctcagggggtgcggtgattcatagttctcactcagacttctctgtgtctgctcatatgtccctatttcatatctcagggtccggtctatcccaaccaggggtcttgccttatcacaacagctgctgttggatgatgcaacaaacatttctacaacttcataacctttatcataagcccccgggcttgaccctcagccatatctgtgctgggttgcaggagaaaagatagcctttaaaactgctatagaggcatttacagtttttcattcatgtcttgagtttggattaaaggcttttaatttgtctttttttcctttgtatgctcttgagggcagtctgacgcagccagtctctgaaggttggcacaaaagcctccatcgagtcacccagcttttgcctggtacctatcctaacctaaaaccttgccacatgttaccttggcgaaaggccagtgccacacttcagtgatgattcggctgtcctacttggttagaaccgagttcacttccttcctcaacactcctgccacattgatctggaagtttcaccttgagccaagtgatagttaattttatgtgttaacttggctaggctatggtttctagacatttgaataccagtctagatattgcagtgaaggtattttttagatgagatttacatttaaatcaatagattttgggtaaagcagattaccctccataatgtaagtggcccttccaatcagttgaaggtcttaggggcaaagactgaggtcctccaaggaagagggaattctgcctctggaccaccttcagactcaagccgcaacatcagctcttcctgggtctccagcctacctgcagatttcgaccgtgccagctcccacagtagtatgagccaattacttaaaataaatctctctctgccaacatcctattggttctgcttctctggagaatcccgactcatacaagccactttctatagaaggctgtttcttcgagaaatccaccctcttctatgtcaacagagtttagaatctccatactttatctcttcatttttgagaacataaattctgtattacacatacttatactatactatatatgaaactttcataaacattgctgggcaaagttgaatattgctgaaccaatttccgatgcttctgaataagttcaatggagttaaaacatttttcttcttacatggtatgtccagtgccccagagccagcagagttaagaacttggtaaggaagaccaaagataatccatatattctagtttgttatataatataaaacatgtttattagattctaaaagacataaaaagaaaataatacatatgtatcagtgagagaggtgcaaattaggaagagaactaaggattattcttaattcctgccttcctttctaaatcccaatcctcaattgaactctttaattatatttcctgtttattttattgaatggaaaaaatggaaaattatctaacatttgtcatggaaatataggagaaattactctcagagatatgatgttatttaagtcattgacatattgttaacctcagatgcaaatggtggaattaataatattcctcagttcatggtacatagtcactgttggtctagtgctagtttgtagttgtatttgtattttttattttttagaaatacggtcttcctttgtcacccaggctggagtgcagtggtgtgatcacagctcacagtaagctcaaactcctgggctcaagcaatcttcctgccttggcctcccaagtaggtaggactacaggtgcatgccaccatgccagctaattaaaatgttttaaatttatttttggtaaatggggtcttgttatgttgcccatagtttttagtgctatgataagctagtaattatagtgaacattcttgtcttggatacccaaggtttttccgttatgtatactagtggttacagattttttggattataacctttgccaaaataggaaagttttgattcctgcttccttaactgtttttcaaaaatcacaaatggatatactttaccaaatgtcttttattaatagactgagcaaaggaaatgacttttctatgaatatggtaaattatagcaacaatatgttttattatattgaaccaccctagtattccaaggattccctatttgatcttgatgtatcattattagcataatcattattattattgttattattatacatatttttagagacagggccttgctctgttgcacaggccgaaatgcagtggtgcaatcatagcttactgcagcctcaaactcctgggctcaaatgatcttcctgcctcagcctccctagtagctgagactacaggtgctcaccatcacacctggctaattttttaattttttgtagagacaggatctcacaggatctcagtatgttgacaatgctggtcttgaactcctggcctcaggcgatcctcccacctcggcctcccagtattattatttgtaatattgttgaattcggttcataaataattatttttttctcccatctgtgttcaaggtgaaatgggtctattatttttttttccttgagttttccacaactcaatttggagtcaagattacactcggctgataaaattagctaatcaggtttagtttttttctgttttctggaaaaagtatataatatagaagtttcatgttccttgaatgtttgatagaactcatctgtgaaaccatctgggcattttcaaaaatatatttttttattagatgccattgataactttaaaaattgctttaatactcattggtatagtcaagttttgtatttctttttgtgctaattttgatagattaaatgtttctaggaatttgcttatctcacctaggttttcaaatttattagcatatacttgttcataacactctatgctttatatctgtgtcatatctgtagctgttccccctttttcattatgtatttgtttattcattttttctccctttatccataatcggccttgttgtaactctgaatatcttacaaatatttttaagtaagcagcttttggaatcaaaagtatgttaattttcactacctagttttttgttctctatttctgtttcattgctttctattcttatctttataactccttttcttcgtatttctttaggtttgctcaacttctctttttccaaatttttgagtagaatttctaggtcctttattttaacttttcttgttctaataaatgtatttgaaattataatattattttatatgtatattttatgtgtaacatttttaacacctggttctaaaagagttaattttctttataactgctgtttatttatttgacacagggtcccactctattgctgaggctggagtgcagtgacgcaatcatgcctcactgcagcctccatcttctggactccagcgatgctcccatccacgactgccttttaaatccatgttactgataaatatatttgttcacttacaattttaagtatattttagttatcaagttctaattttattacagtatggttgcagaatatagtttctttctttctttttctttttttttttttttttttaagacagtgtcttactctgttgcccaggctggagggcagtggcacaatctcagctcactgcaacctctgcctcctgggttcaagcgatcctcccgtctagccttctgactagttgggattacaggtgcaccccatccagctaaattttttgtagagacggggttttgccatgttgcccaggctggtctcaaactcctgggctctagggatctgcccaccttgacctcccaaaatgttgggattacaggcatgagccactgctcctggcctagaatatagatagtttctaagataccgatactctggaatttattggcgttacctttatggaatgatgcatgtcctatttgagtaaatgttctgtgtggcttgaactattatatataatttttggttttctggcaacttttaaaaaatgaattttatgaatcttgtacctcattttatttccttctttgctttcactatcctatggcctggagccaattattttttatccatttatagttggctgataaatatgtgtcctgttaaaccggctctctgaagaaaaacaatgcttctgacttgtagcattgctgatttctatagtataaatacttccatagtggtcaatatcaagttaccaatagttaacaactgtcttcaaaaatcctgaatactttgcagtctgctcttgctagccagtataagacagcgcaccacttttttttttttttaagatattcacgttgtccattagtttccattagtttcactccttggcttcacttacttttcttaaccatattttctctctgacccagtgttgttttcttcttttaaaaattgttttaaattatctctgtaagctgctacaaaccttttattggaatgaagggcattagaacagttatttggccaatacagaaaaatgaagtcttctaattttttttttttttttttttttgagatggaatttctctcttgtcgtccaggtggagtgcaatggcgcaatcttggctcactgccacctttgcctcccgggttcaagcgattctccctgcctcagcctcccgagtagctgggattacaggcaccatgcccagctaatttttgtattttaagtagagatgaggtttcaccatgttggccagactggtcacgaactcctgacctcaggtgaaccacccgccttggcctcccaaagtgctggaattacaggcacgagccaccgcgcctggccgaagtcttccaattttaaaagatctaatcttcattcagttctcaaagtctttgctgtgcccttaaggcatgtcacacgcatgtgcagctcaggggtaacctggtactcctgagggttcagactcagaattagggaatttccgcctgtactctcagtttggagattcccctacacattcctgcccgcaggggccctttttcttcattcctctggccagaaagccggtatttctcttgttaactcagggcttgtgctaccacgcagtgcagctctgcacctgaggcctgacgtcagggcagagctgggaggaaaaaaggggaaaacattgaaaacccactccccaggaggggcccctctcccagttttgaccctcttcacaatccacctgcttttgtttactttttggagtccttgagtacttgctttttgtatactgcccagaatttctacttgtgatcagtgggaaaaatgggctatttaaaatctcaaataagttaaatatcatggctagaaacaactccaggcatttgtaattttagatttttttctttacactccagggggatgtgattgttttagagttttgaattcgtatgtttagcctgagatcctactagtatttctgttgaatatgcctgttgactgcccacttgttagcaaaatggcattgaatgttggaactgtaaactaccttagaaatcattcagcaccatcttttgacagaaaaggatatgagagttcactcctgtcactcaggaagtgcaaggcaaagatagaagcagaattaaatttgttttaatacagttactcagccatctggtaacagtttcctaagtgccaacgaatgtatggggctatttattgcagattttaagatgatatatggggattgagggaatgagaagttttagggagtggtagaggaagggcatataataagactgaatcccagatcccagcctcagaacttattttgtgaccttggtcaagtgatttaatctttccaaacctctatgtgtcctatagaagtaataataatacctatatagggttgggtgttttttttgtttgttttttctttttcttttcttttttttttcttaagatagggtctttctctgtcacccacgctagagtgcagtggcgcaatcacagctcactgtagcctcaaactcccaggcctaagcgatcctcccactcagcctcccaggcagctgggactacaggcatgcaccaccgcacccgactaatttttaaatttttttgtagagatggggttctcactatgttgcccaggctggtcactaactcctgggctcaagcaatcctcccgccttgacctcccaaagtgctgggattacaggtgtgaatacagggggttttttggtttgaattttaagagataaaatttataaaacatttagccaatgccacaaatgtagcttcttttggttattgtcattattctttgaaattcacaagtgccccaaaatatttaagcatttttcatgtattgccctttaatatgaatgaatgcattatgaaaggaattcttttacatgcgagtttgctgatagtcttagctaattctcatgtgtgtaggtgtcttgcctatctgtcagtcttagccttaaaggaaagagtcccatcacctcacttgcggcctcatcatcatggaccgcatgatgatgcggaatgagaatttttattgtttgtactacttcaaaatcattcagtacgtgatcacctgtcatgtatagggctctttatatttctagtttagtcccttttgttttctctaggaaagatgttttagacctgggacaaaagaagaaagagtgtatgctgacatctaggagggaagcacccacctcccctaagctccatctccctgagcactcatttcccaatgaccataccaggttttggccctagagagtttattacaaaataagaaagagaagtctggggaaggttcactcatcatagaattttggcagttcattgcccaagatgactcgatggtccacaccggcagctgtaatagtgaccaggtagatgacacccccgcttgagccatcccggctcatggccagagcaatagctgcagagggtttcaagttggagagagggagagagaggatggcttagcttcaaaaatctttttactccccctccatccatatgcctactaccactttcacctcaaaactcatcttccaggaaggcatatttagtggtgtgctggtaaatcagtttttttacaaaaaggcttccatatgtggcatctgctgatgtccgtggtgtaaatgctcccgctatgatgaattgcaagttacaaatagctaagcagttcacaaatccttgactatttaacagtccgctctcatgagtggtcccaagccagcctcagcacacctcagcacaccactggttctttttttttttttttttctccagacagggtctctctctgtcacctaggctgcagcgcagtggtgcaatcaccgctcactacagccttgatctccccggctcagatgatctttccacctcagcctcctgagtagctgggactacaggtgtgcaccactatgcccagttcatttttttttttacttttttttattgttttttgtggagacagggtttcaccatcttgcctaggctggcctcaaactcctgggctcaagtaatcctcctgcctcagcctcccaaattgttggcattacaggtgtgagccactgtgcttagcacaccactggttctcacagtgactgtgtatcctcatttgatttactcagaacagccctggtttatccgtattgcccaagaaccccattgagctttgcatttgtcctgccccttttcactcttaaaagtgtaccaggcccggcattaacttaaatggccacccctgtatttctcttcctgttcctcataatctacttccttcccatgtttcaaagccctccccaggtacccttccacttggctggttaccgtctgtggtgaagcgcctgcactcctcgggagacatgcctggcttatatgctgcatccacataaccatagataaaggtgctgccggagccaccaatggcaaaaggctgtcgagtcagcattcctcccagggttccatatacctgggaaagggatcctcaggttaaagaatcatcaagcccttccttcccactgagacattaagtggtctctgcaccctgcaatgaagccctggtatctcatatccccaaagtactatgctttcagaggtagtgtccttggaactcattgctagaatgacataggacttccatcttcctctgcaggagagtggggaagcccagaggagagagtgctttgggagaaactcacctgacctccttcacgttggtcccagccagctaccatgagatgtgcagacaagtcctctcgatatttatagctgatatttctcaccacatttgcagcagccaaaacaagtggaggttcctccagttctatcctgagggaaatattaggaataaaggttgatagaattttaagtctcattctcctatactgttaccatcatccctgctaaacgacccctgaaaactgtaactgcaatagctcaaactgcagcctccctcccacatgtacaggggaaccagagtcccacaccaccaactggtaagaagctttcaattgctcactcttttgctcagccccacccacataactttcttttggctgcaaggaccctgctcttatggggaaaagcagataaggttacttccgtcccaacgaccttgatttctcgtatggtaactgcctgatattatggtgggtcacaatatcaccttcttcctgattatttatatcaggatagtgatttacagcttttaaactgtgttcacatatagaatgtggttctcaaaataaccgtctcatgaggtactatattatctccactttacagatgcagaaactgacagattcaagtgccagcaagagccgaaacaagacttttccatttcccagtgtccagctcctggaacagcacactgtacagggattcatgcaggttgggggagctctagtgggtggggagtcagaactccagagcttcatacccatggagctccagctggtaggcggccatgtcggccacggcttgggcatcagcagctgaaccagagagtgcacagtagatgcgctcgtgcagcggggacagcttgtcaaacactcggttcaccaccgcctcgctgtcaggagggagtcaacagtcaccaagttaaaactcaggttttttttttttttttttttttttgagacagtctcactctgtcacccaggctggagtgcagtggatcaatcttgggctcactgcaaacttcgcctccctggttcaagtgattctcctgcctcagcctcccgaatagctgggattacaggcacccaccaccaagcccagctaatgtttgtattttcagtagagacaaggtcccaacatgttggccaggctggtctcaaactcctgacctcaaatatctgcccacctcggcatcccaaagtgctgagattatagatgtgagccactgcacccaaccagaactcaggaatttttgagggtgatcattcaatgtctctcaaatttctttgacaagagaatagcatgaagtttaatgcttggattaaagcaggaggcaaataatcatctcagatattattaatcactgcagatgttaatcaaaattaggcttatttttcaggcttagattttataacaaagcaaaaaatgctaaggtaagaaaaatatgcctcatcaattttctttgctattaacaatcttgagagagttatgttctatggaacataatgtcagtaatattgacctaaccccatatactcattttgcatgtgaggaaattggttaggagtgggagaagagacaaaatagttcaatatatggtaaatgagaaaccaggtatctgcttgacagaatcatctttttgatccctaagcacagatggaaagaagaccctcaaaaatctatctcctgtccccctctcagaccctattcctttactcatccctgtacactactgggacaggtcacatacacattcagaccccagatcctcctccacaaattcagagacccaagcacccaccaaatagcttatcatagtggcttttggggaaggtcaactccattcctccaaggctccagtttgccagtcttttcatgaatgggtaaggaaagtgtgtatttgaggccattagcttctttccaaatgcatacatcttcacttttactcaccctgcagacactcgggaatcagaacccatcacaacgcccccgtcaaactccactgccatgatggtggtctgcagagacacagaatatggaatgtcagggcaagaacagccttgatgccctcatgttagagaagaagaaacattcccagagaggcgaagtgactggctcaaagattacacagtaacaggccagagctgactgtcagtacaggctttttttcccttcatctttccactttctctattgcttcatccggctgcaggggaatgccacagcccagctgtgatacaacacagaaagaactgtgtccctaagttccaacttgcctagtggaatcctctccactgtagagaggtggagatgaggctcctacaggtagaagtgaagcagctccgcaagtgaaaattatctccaacggaagggctcatagtatgtgcagatgtggtgtagacccaacacagagtaattgactatgatcttgggaaacaaggtcagtctatttttttttttttggtccacaatcctccactctcaccccccatttcatcagaagtgagctcttccaatttactgaacattggaaaaaatcgaggagggcagtggttagcatggccaggggcaaggcaggagagaagcagcaaggaacacatacagatggttgaaaataaaagtttcagttatggaatttccgatcaagaggtaaatacatatctcagcagccagggaggtaaatttgtaccaagagataatttgactgagaagtttaagctgacttttccaggtcaagaaaagaatcaagaagaagtgagggaagataaagctacatttattctactattgagttggaaggagccttaaagatcctcggttcaaatgaggaaaccaagtcacagaaaatgcaaacgacttatgcaaagtcacacagagttaatagtagacctgggactaaaattcaggtctaactcttatcccttgtttccacttctacttcctacttgccactgctcatttggcagtgaggggagatttcccaaattataagtggtttcactgtgtctttcttaccaggccgtaagttactctggccccaaaggacgctcctctgagtatgctttccgacggaccgacttatcatgaatagagggtcaaagaacagggttaacttcaagttagaggctattcctctctaacaaagccgcccccaagccacgagtggtggcagtagtccagagcagaagccagccagccagtcttggggctgccatctgccccaggcgcccatcctaagcaaagtccccccagtgggcacatgggagtgggcagggaagacacagggaagggagtaaggcagcatctgggccaaggagaggccttcctgggtcaagctagggaagggcatcactagttaacacagaacgcccattatcagtgcttgggctaagagttgcccagtggcaagtttatcaaaagtctgtgtgatgagttggtccttctcaataagtgcctatatttccttctcccaagtgctgttctacttcacccagggcaccatttcctcatctctttgcaccatccccaaccccctttcttgatttaaccagcccccactgtccgggaccagagtgaaagcgaaagcgctttagagtagcttcccgttgacgcttccagctaagagtcaaagcacccgctttttccaccagcctcgcgtgcctgttcccttcacggacactctagacgacccccctcagaaaagaaatactctatgctcattgcgggttgcaagcgctggctgctacaggcgacctccctgcgctcccgttggtctctgcattcacttctccgcgcgcgcttccagggtcccctggccgctgcatctcctccacccctctgccaaccctcaagcccagacccattaccccggtgtggacttctcccgcccggggtaagtccccggttggtgctcccgcccgcagcatccctgcaaggcaccgctctcctcgccgcctggggcactggtttccaacctgggacagcgcacaacgcgcagccgacagccccgccccttcgcggcgccgccaggaggcgcctgggtgctgcggggctgctttgcgcgcggcgctaacgtgtgtagggcagatctgccccgagacaagtgacgaggcagccccgccctgaggctggggtgggaaaactggtgcaagtggaaaggcaggaggcagggagaggcgagaagggtgtgcgtgatggagaaaattgggcaccagggctgctcccgagattctcagatctgatttccacgcttgctaccaaaatagtctgggcaggccacttttggaagtaggcgttatctagtgagcaggcggccgctttcgatttcgctttcccctaaatggctgagcttctcgccagcgcaggatcagcctgttcctgggactttccgagagccccgccctcgttccctcccccagccgccagtaggggaggactcggcggtacccggagcttcaggccccaccggggcgcggagagtcccaggcccggccgggaccgggacggcgtccgagtgccaatggctagctctaggtgtcccgctccccgcgggtgccgctgcctccccggagcttctctcgcatggctggggacagtactgctacttctcgccgactgggtgctgctccggaccgcgctgccccgcatattctccctgctggtgcccaccgcgctgccactgctccgggtctgggcggtgggcctgagccgctgggccgtgctctggctgggggcctgcggggtcctcagggcaacggttggctccaagagcgaaaacgcaggtgcccagggctggctggctgctttgaagccattagctgcggcactgggcttggccctgccgggacttgccttgttccgagagctgatctcatggggagcccccgggtccgcggatagcaccaggctactgcactggggaagtcaccctaccgccttcgttgtcagttatgcagcggcactgcccgcagcagccctgtggcacaaactcgggagcctctgggtgcccggcggtcagggcggctctggaaaccctgtgcgtcggcttctaggctgcctgggctcggagacgcgccgcctctcgctgttcctggtcctggtggtcctctcctctcttggtaaggggaacgcagggcaagaggggaggacacaaggggactgggacaggaatcaaaggtaattgtcagtaaggtagagtagcgtgggttctgggaaatgtggagcgggagaaggactcctagcgtgggtcttggaacaccacttcggtgtagaagaaacggcactggactggcgggggccagaggttctgggctccattgctgaccgggtcttgattctttgggccacgccggaagcggggaaatcctttgctctggggccgaagggcggggcatcctcatctctaacaggaggcttttctacttcatgatctccagccttcctaataaaatcctgaaagttctggtagagcaaccacagggtagtgagttccagggcagcctatttaggttcgggattgagacgtcagtgtttcctttctgctgatgccctccaggataatggtgagggggaggaggcgtggtggggccagtctgactggaactgacctacttagacttaatatttgtgcgtgacctctcttctctttctccaggggagatggccattccattctttacgggccgcctcactgactggattctacaagatggctcagccgataccttcactcgaaacttaactctcatgtccattctcaccatagccaggtctgggggctgaaaatggggcaccctgcaaatgagggagttggaagttggggctgctgtccgaaatgcacttatatggggatacctgggaccttcagtctgttccctgaacacaccctgatcccctttttttccgggttctttatagtgcagtgctggagttcgtgggtgacgggatctataacaacaccatgggccacgtgcacagccacttgcagggagaggtgtttggggctgtcctgcgccaggagacggagtttttccaacagaaccagacaggtttctcctgaaactctttcattatacgccatgtactgttcatatcctcatacatctgctttgatctcccccctccccgctctctctctctcacacacacatacacacattgttccttctcattcttgatataccctctccctgtctctctctctctgtctctgtctctctctctctctctctcacacacacacacacacaattgtttttctcattcttgatatacctcaggagcaaaatattgtcctccttaccttaagaaaaacctagagttttcatctagcattttcttataaatctattcctatgtatccttagatagaaaccatagaatttcaaacctggaaattttgagctcatagagaccaactgcctcatctgacagagaaggaaactgaggccaagaccctaaatgctgaaactgcacagttacatatggctagagacacacttggggttagaaccctggtctcttgagtgctccacagacttcggcatgctttctagcagcactagaagctgtacagttacatatggctagagatagacctggggttagaaccctagtcccagtgagtgctccacagactttggcatgcttcctagcagcaccctcctcctccatctctgttatgtgaccagtttaagctcttcctgcctgtgtgtatagcatgggacatacaggttctctagggaacagaaagctttcaggaaaatggaaattcacatgtgcattaatgactttataattaaaatgaaggtcaggcctttcctctttaacactcatcttccctgcactgagatttgcagacctctggagaaccctaaccttgtttcctgcagcctccttagaaccccatgttgacacccctgaccctggcatcctggctcattgttagttcgtctcatcacttggaacctgtctgattcacctcactctcttctccccaaccctgcaggtaacatcatgtctcgggtaacagaggacacgtccaccctgagtgattctctgagtgagaatctgagcttatttctgtggtacctggtgcgaggcctatgtctcttggggatcatgctctggggatcagtgtccctcaccatggtcaccctgatcaccctgcctctgcttttccttctgcccaagaaggtgggaaaatggtaccaggtatgttcatggagttggcccgctctacacagaccctcatctcccagacttggcagactcagttcctctcacattgctttcagtccagctttcctggcacccttactgattctccatcttcatggaacaccctgtccctgtggtccatgttcccaggttgctcaacattaacctccatactctctgggtcttcttttctagcttctccccacaatctgtctttaagaatttgatccccaacccgttctgagtcattttcctcttcctcgtatttctttagcatccaaggggcatagctgtgtctctttctcttttctccttttcctctgtctcttctcacctttaatttccaaataggtaactcaggtattagtgtccctgatggtttgccaacccgtgtgacatctcttgtccatgtatccacagttgctggaagtgcaggtgcgggaatctctggcaaagtccagccaggtggccattgaggctctgtcggccatgcctacagttcgaagctttgccaacgaggagggcgaagcccagaagtttagggaaaagctgcaagaaataaagacactcaaccagaaggaggctgtggcctatgcagtcaactcctggaccactagtgtgagcacctgaagatgaatacccattcccttgtccttaagatgccgtgactccattcccattcctatgaccctgctcccactccttctttactgggaaatggttggttcagtattttcgtcctagcaacctgaggctcaatgactctactcagtgtccctagccccctccctctctttaaagatgctaggtggcttcctttcagtatggtacataaaatccacccaaccatgtggattggagagatgcgtgtcttccagtcctagggccttcctttgcctctcaggggaagtgcagggcgccataaattcttgcacctgggactgcttcatgctggtaccttgtagatttgttagtgagagtgatgggaatagtggaagccagggatgagggacatctgtgatgcactggaaagagagctacgccagtgatccgaagatcctggcttgatgatgcaatttacttgtcttgtgatcatgacaacaaatttaccttctctgagactgtttcctctttatttatttatttgtttgtttgtttgtttatttttacttattattattatttttgagctggagtctcgctttgtcgcccaggctggagtgcagtggcgcgatctgggctcactgcaagctccgcctcccgggttcacgccgttctcccgcctcagcctcctgagtagctgggactacaggcacccgccaccacgcccggctaattttttttttttttttgtatttttagtagagacgaggtttctccgtgttagccaggatggtctcaatctcctgaccttgtgatccgcccacttcggcctcccaaagtgctggaattgcaggcatgagccactgcgcccgactggttgtttcctcatttttcaaaaatggagtgatataaccttctttataaggctcttcatgtattagctgacatcacatgaatgaaagccttttgtgaagagtaaaatgctccccagacaaggtgatagtggtgatggtggtgaagataactgtgacttgcatgatgtgcattgagtcagactccatggggtctctggttcattctcctgtctgcctattgagcctgccgatgtcacttaggagacagggacttgatatttccttcaggttaatgactgtggttctttgtgtcccctccagatttctctacctcagtccctttttttgtggtctctttatagatttcaggtatgctgctgaaagtgggaatcctctacattggtgggcagctggtgaccagtggggctgtaagcagtgggaaccttgtcacatttgttctctaccagatgcagttcacccaggctgtggaggtgaggtccctccaccttcactccccagtgtgattccttcctctggcccagcaccatctgtgtgatgtccttccattctttacccttcttgcttcacataatgctggcaagcagactacctcactttcactattcttacctccctctaggtactgctctccatctaccccagagtacagaaggctgtgggctcctcagagaaaatatttgagtacctggaccgcacccctcgctgcccacccagtggtctgttgactcccttacacttggagggccttgtccagttccaagatgtctcctttgcctacccaaaccgcccagatgtcttagtgctacaggtacaacctaccactccctgtattccactggccccaactgcaattctgccatcctaaattttcttcctgccttcagcctgcttactgccaagcatatatcctccctaaccctttaaaggcaatggtaggcatcatctgttccataaatcttccccaaactcaagaacccagtttgggcttccaaagagaatgagagaagaggtttcgaagagagtgctctcacgttccaaggaattgctgcagcaaaatctgtgtcttcggtcttccatctttccttttcctttgtaatttggaatgtgatttttccctttcctggtggtatctgacatcaagtgtgtggcatagtggtgctgggtctctgcccttgtctttgccgcttcttctatctctactccttggggaggcatcacccagaaatctgtgcatgtgggagggtaggagtttctatatttccctgtttttcttctggggtaagacatcatgctatgtaacaaggcaatgacactctcaaggttagaggccttggtagcctcttatcgtgtgcttctctggcctctaggggctgacattcaccctacgccctggcgaggtgacggcgctggtgggacccaatgggtctgggaagagcacagtggctgccctgctgcagaatctgtaccagcccaccgggggacagctgctgttggatgggaagccccttccccaatatgagcaccgctacctgcacaggcaggtatggaagcaggtggcttgaaggagggcagggagcatcaaatacgaagagcattcttactgagcactctgaaagaggggttagggaatgataagagaccttgggtggagatggtggtgtagtcaggagggaggtagtatgattttgtgacatgttctcaataaagattttgagtcttcgatctctagataaccatactcccatgtgccttgttctatgactcttcatcatatttcatctcaggtggctgcagtgggacaagagccacaggtatttggaagaagtcttcaagaaaatattgcctatggcctgacccagaagccaactatggaggaaatcacagctgctgcagtaaagtctggggcccatagtttcatctctggactccctcagggctatgacacaggtactctctccactcatctcaccacccagccatctttacctttgctgaaaccccagtagtcttgcctttatccttcagttcctccttactcatggacatcaatttgaagttgtaagatcatgctcctatggcttcttcatcctgacatcctcaggattctgttcatcttcccagaatctcccctatccagctacaaccgtcagatcttggtgtgtgtgagtgcgtgaatgcatgagtgtgtctgtgtgcatgtacatgcgtgcacacatgtggctataccgttctcatcttggccctttgctctgcagaggtagacgaggctgggagccagctgtcagggggtcagcgacaggcagtggcgttggcccgagcattgatccggaaaccgtgtgtacttatcctggatgatgccaccagtgccctggatgcaaacagccagttacaggtgaggcagtcatcttcttaatggctatatcccacccaatcttgcttcttttatacatcttctgttagttttactaacatcataattatacaaaccagtccttgcagttctcagttcccaaatccagttccattggatgcctccccaaggagtagagatagaagacgaggcaaagacacctagaatcagttaaaagagactatctacaaactacagactgaatttctttctttctttccttttttttttttaagacagtgtctcactcagttgcccaggctggagcgcagtggcacaatcttggctcactgcagcttcaacctgctgggctcaagcgattctcccctcagcctcccgagtagctgggactacaggtgtacaccactatgcctggttgacttttatatttttagtagagatgggtttcaccatgttgcccaggctggccttgaattcctgagctcaggtaatctgcccccctcagcctcccaaagggctggggttataggtgtgagccactgcgcccagtcctatagactgaatttctaaagcgaaacataaggaaaagaccatcctcataatatcgtttatttaaaaaaattattttttgtacagacagcgtcccgctatgttgcccaggctggccttgaactcctgggcccaagtgatcctccctccttgacctcccaaagtgctaggattataggcatgagccaccgggcccagcccatcctaatcatattaatattaattaagctagtctgtttacatgcactgtcactcatttattcattaggaatccttctgagctaggcatttatcatcattctacagatgacaaaatggaggttaaaagaggttgaataagctgctcatatagaggtcatatagcttttgagtggcgcagccttgacccaaattcaggtctgcctgacttgaatgctcatctctttactactaagttatatttccttaaaatcgaatataaaaatgccaagtccatgggtagagaagaggactattcaatagtctttattcttctgtcacgtgtttcaccctagggttctcatttttatcctacttttgcacccttcatgtaaaacagtccttaatgaaacaaagggtttgcggagaagtactcagaatgggaaacgttggtgtccttggggttgttagcagagccagcagtgatcctgtgaggtcagtcccagccctggaaacacaggtgtctccctgggctgagggtagtccccggctctgacggtccgatgtctttcctcaggtggagcagctcctgtacgaaagccctgagcggtactcccgctcagtgcttctcatcacccagcacctcagcctggtggagcaggctgaccacatcctctttctggaaggaggcgctatccgggaggggggaacccaccagcagctcatggagaaaaaggggtgctactgggccatggtgcaggctcctgcagatgctccagaatgaaagccttctcagacctgcgcactccatctccctcccttttcttctctctgtggtggagaaccacagctgcagagtaggcagctgcctccaggatgagttacttgaaatttgccttgagtgtgttacctcctttccaagctcctcgtgataatgcagacttcctggagtacaaacacaggatttgtaattccttactgtaacggagtttagagccagggctgatgctttggtgtggccagcactctgaaactgagaaatgttcagaatgtacggaaagatgatcagctattttcaacataactgaaggcatatgctggcccataaacaccctgtaggttcttgatatttataataaaattggtgttttgtactgtggtttcttatgtttccggcacaccaaacggcccactgccttttgcagcgcacttttcagctgcggatgtctcctcttttatcatcctcaatgttttaccccctaactgcatcaccttttcccttaagctttttaattcctatgaggccccttccacttcccctatccccttaggcccacccccaagaatgtgcaagaccccagccacagggcccatcagggcactagcggccgcagctcagagccgtggcctctccgaagtggcagatggggcgggcgcggccagagcaagtgccaggcgggaacagagggactgggcgcgcctcacaactcaccacctcgcccgctggtccttcctggctcgcctggctctgaagctgcacctggaggggaaacctcagaacagtaggcgggattgcctagtaaatatctcccattcagggaggcccaggtcgtgtgacgtcgacagttgctgggtagatgaggccaacacaggttgcaagaagaggcggggtttagaggcgtgaaactccgcagtgctcagccaagcagggagcaacgctaggaagggcgggcagaaagggcacgctcttgtgggtgactacaggttaggagaccgttgaacctggaggggccctaggatggaccccgtggaaagattcagagactgcgccctctccctggcgccgccttcccctacacgcggcgggtatattctgttgcagttggcccaggacctgtttccaagactctgccccctcgcacttccgtccctcctggttttgtaaagtgatgctcataggaacccccaccccgcgtgacactactcccagctcctggctgacttctagtcttctggttgaagctgcgcctttagatgacacgaccctacccacccctgtttccagcggatgcccgggcctggaggtacctcttactgtaacccatcgccaagtgggcttttgaaggcgcctgttcctttctcgctttcttcggaagacccttgacccatcattcccccgacccccataacgggagagcagagaagccggtccccagtgtgatggtcctggtccaggcactaactgtccttttctcggaaaaggcagggggatgtggaaaagagtcttgttccctccccttcgatctgtggctttcgctttcacttcctcctccgagagcggacagatctctgggtgctgggcggtcatggcgctactagatgtatgcggagccccccgagggcagcggccggaatcggctctcccggttgcgggaagcgggcgtcgctcggacccaggacactacagtttctctatgcgatctccagagctcgctttaccccggggaatgcaggtcggggcagtagggaagcccctagggatgcagggaggcgggcgctgaggagtggagggtcgcctgagaggaggaggcgagagcgggagcgcggggtacagggtcgggggtagccttcagtcccggagagcgccagacccaaagaagaggccacatggggatggggcctgagaggaggaagtgcaagttaggacaaagagttacaggtgaggtgggggctcccaaaggaagacaagagaactttcctgcccttgtccacacacaaatggtggagcctttttcatggggttatcacatgatataggaggtgtgtggtgtcttgggaaacctatgaaatttgcctgctggcctcctctcagcaactcactgttgcgcgacttagaacaagtcacttagtctaggtcccaagcccctcttctgtaaagtgaggatactgttactaaacgtgttttgtgagggttgaatgctttatgcatggaagaaaccctttaagtcactctcaaaattttttagtaatggtaacatgtgcttgctttcatttctgttgtgctggaaaatggaaaaggttgatactggcatgcctcttcttttccttctcccaagccatttccttctagagattggttattaactgtttcatttattgatggttagatcatttctgcatatctcctcaccctcatactccctaaaaccttttcctggagcctcttactacagaatttttcattgcctttctcaacctcttttctcttatcagcccacagaattcttccagtccctgggtggggacggagaaaggaacgttcagattgagatggcccatggcaccaccacgctcgccttcaagttccagcatggagtgattgcagcagtggattctcgggcctcagctgggtcctacattagtgagtgtatacgctccagcaggcagaatctggggagctgggctctcctttccacaggaggccaactctgcaacaaagtggaagtggatattgatttaggacacactgggggatctatggggtcatcccttctctcccaaagctccatcttcttccaggtgccttacgggtgaacaaggtgattgagattaacccttacctgcttggcaccatgtctggctgtgcagcagactgtcagtactgggagcgcctgctggccaaggaatgcaggtaagcgaggcctctcatcttcctttcttagcctagtggttaatccctggatctctcagatcattgctccttactcttgtcctatgtggtccatcttagtgctaatagtatatttcacaaaacagctttttggtgataagacccttctcccaaatctcagcctgtgctccactcataagccagatagtacgtcaggtatttagcactgacacatccaccctggcgggacagtatcatttactaggctgcctttgtatgtttcagatactttaaattccaaatctttctctgatctttagatcctacaaaataattcctttccaatgcttatctctttaatcatttcctgccccatcaagttggaaagagctaacctctctttcctcactccaccttgtcctcacccaggctgtactatctgcgaaatggagaacgtatttcagtgtcggcagcctccaagctgctgtccaacatgatgtgccagtaccggggcatgggcctctctatgggcagtatgatctgtggctgggataagaaggtgggtgctctccattcttcatgttcccccaccatgttccctatggatgacagatctgtttcccatcatatactcctactccctccctgacaagatgcatggcatatagagtgcttggttatagaactgtttcagtatatccatggactatttattggcccagatatgaatcattgcatgtgttttgtaagcttgtcccttttgttaaacagttgatttcaagtttgtttttcctttttcatttctaaagttcgatgactttaccaaagtggtttcctaattccaatgttcttgtggtaatattaattcttttgttcactttttatgtctcatatttgaacccccatgttaccaacatcttcctctccaatttcagcctgaaatctttcatcttatagggtcctggactctactacgtggatgaacatgggactcggctctcaggaaatatgttctccacgggtagtgggaacacttatgcctacggggtcatggacagtggctatcggcctaatcttagccctgaagaggcctatgaccttggccgcagggctattgcttatgccactcacagagacagctattctggaggcgttgtcaatagtaagagaccaatgctcccaccaccatgcctgggaggagtcggcgggtggtggggggggtgatttaagattgagaaaccagcctggccaacatggcgaaaccccgtctctactaaaactacaaaaattagccggacgtggtgacgggtgcctgtagtcccagctacttgggaggctgaggcaggagaatcacttgaacctgggaggtggagcttgcagtgagccaagatggcgccactgcattccagtctgggccacagagtgagactccttctcaaaagaaaaaaaagaaaatgattgagagactcaaaggagggagagtagtagggaggaaattttcagagtcagaagaagggcattaaaggcccagtcatatggttttaagcttgcgcatgtgtcttgttgctgccttcaacataacatcagtgacaggaacttgctgaggtgaaaggtgactccatgttcttttctcatttgtccacagtgtaccacatgaaggaagatggttgggtgaaagtagaaagtacagatgtcagtgacctgctgcaccagtaccgggaagccaatcaataatggtggtggtggcagctgggcaggtctcctctgggaggtcttggccgactcagggacctaagccacgttaagtccaaggagaagaagaggcctagcctgagccaaagagagagtacgggctcagcagccagaggaggccggtgaagtgcatcttctgcgtgttctctatttgaacaagcatttcccccagggaagtttctgggtgccccactaagtagaataaagaaaaacggttataaatacctctgtcttgtggctgaatggggttgggcctgtggttgttgggtggggcagaaagtaaagagacgctttttctggagaaggggctcagacccctatctaagaaatgtggcctcaccacatagttcttcctggggtttccttccacactcatctctccaagacctcaggaaggctgctcattgctgtccatggacacttgtttgcaatttcacataggttagggtcctttccatagagaggcacctggggactcctgtgtgttccattgttaatggtttgaggaacagggagtagggcacctaggataactgtttttgactttatagagtaggatgaaaaagcttccacttcactttaatatggtaatcatataaacaccataccatttatcccaaataacactttggagatattggatattgaatataaagacagacattaagggtctaatttcatgatgtgtcatgctgaattgcaagatggcaggactataattttagaggaagaagagatcaggaggactcccctaagtgaggagtgtggggaaaatgtaaaagatccaggttagaagaaagagacacacatcatgagattttcggaatcatgctggaactatggaccatgtcactttccagaaaataaaggaaacaaatgcttgaaagtaggagcatgagcttgagcatggagcttttttcattagagagagattcttaaaatgccagaatgaatagagttgtaaaactttagcgagcccctacttaaaatccctcctccccaccaccactattttaaactttaagtgactccttggtagtcacacaggtaacatttcaaaatggtgatctggaatccaagcgacccttcctttggggaatttgtttgtttgtttgtttttagtttgggaggtggtttcaatctgaagagtcctttctggaataaacgaatctttctgttgcataggaaggctctgggtcaggaaggatatttaaaaacctaattactgttctaaacagtgttaaaatagaacaagaaccaaagctcagtacggggcatttccctcataggctgaaggtgcgcccaacataatttggagtacagactcagaggcacctgaacacgcgccagctcaaggtgctccggctgagaaggacggatgaagatgaacgctcagggcctactaaattcaaagtctgtacgtgaaaatcccctttggcctggtgagattggttggaaccttctatttaggagagcccggctcgctcgcctaaaactggagcttgcatggaagagggcacttttttttttttagacgaagtctcactcttgtcgcccaggctggagtgcaatgacccgatctcggctcactgaaacctctgcctcctgagttcaagcgattcccctgcctcagcctcccgagtagctgggattacaggcgtccgccaccacgccctggctaatttttgtatttttagtagagacagggtttcaccatgttggccaggctggtctcgaacccctgacctcaggcgatccgcccgcctcggcctcccaaagtgctgtgattacaggcgtgagccaccgcgccggaccagaaagaaggcacttcttaatagtaggctcagagcttgaagtagtaactttgagaaaattcagtgattctccaattacaaagcattctccaattacaaagcaaggacaacagataaagttgcccttgagacaactgtattttacttaatgataaagaaacatttttgcagttttatatcccagagtaaccgccactaaaggcgagtgagactcattgcaggcctgtacagtgcgaaccagagttcgggctccagttccgctgtctgcgggtctcgcgcgccccctcccggcggcccagcccagaatgaaggccttggctggggaagcgaaagcgaaagctgcccgagccctgacgcccgccctggccgagcgtagctggcggaccagagccggtagcgaggttgggagagacggagcggacctcagcgctgaagcagaagtccccggagctgcggtctccccgccgcggctggtgagttggtgcggaggggaacctggagcgccaacagggacgcagcccaagtgactacccactccacgctcctgcttcccagtccctctgcacccggcgataggagggagcggagcccggaccacttagctcgccgcggcaggcgggggtgggggtgggggtccggggattttttttttttttttttttaagcacgaggctcctgatggtcatgcttccagctccccagaaggccgaaagctgtctgtcgtaggaggggtgtacggatgagcaccggttactcaggagagctctcagggttgaataggataaaatgagaagccgatggacgggttaggcggagccgggcgggtaggagggcagggacaaggattgggactccacccccatgatttctcatctcgtatccgttgacagagccatgcggctccctgacctgagaccctggacctccctgctgctggtggacgcggctttactgtggctgcttcagggccctctggggactttgcttcctcaagggctgccaggactatggctggaggggaccctgcggctgggagggctgtgggggctgctaaagctaagagggctgctgggatttgtggggacactgctgctcccgctctgtctggccacccccctgactgtctccctgagagccctggtcgcgggggcctcacgtgctcccccagccagagtcgcttcagccccttggagctggctgctggtggggtacggggctgcggggctcagctggtcactgtgggctgttctgagccctcctggagcccaggagaaggagcaggaccaggtgaacaacaaagtcttgatgtggaggctgctgaagctctccaggccggacctgcctctcctcgttgccgccttcttcttccttgtccttgctgttttgggtgagtcaggagaggacgttgtgagttggaggtggtaaaagggcctgggcaccagcacattcttgtgttatttttcatgcctctttcaggtgagacattaatccctcactattctggtcgtgtgattgacatcctgggaggtgattttgacccccatgcctttgccagtgccatcttcttcatgtgcctcttctcctttggcaggtaggtggtgggcagctgggtccatttgctagccccaaatctttataggggtcttcacttccctaactccatttctaggccctttcaggcgcaaaacacaaaaatacttaaactaaaatatggtgaatgtagtcaccattctgtttcatctatccattcatttcttccttcgttcatattcatccaatatcttcaaagtttatctgatcttattataggaacaagttatgagtgaaggtagtacaaaaggaatttaagtctcagatggaatgtctctcagttgtctctcaacattcctaggtccatgaaattccatttctttctgcctcctacctcctacccctaagtctgtctccaaagtatctctccagggtcactctctcaggatgggtatgcttctccctctcactcttctttcccagctcatcttgctaatccctgaagatcttactctgaggcttatcacctttctttccagaatcattactcttttcccttcacttgctttcctttctctttctagacatactcaaacaaacaaactgtttgataaggctgggactgggatgaggtgagcgaggcacctggggtgcaaagtttaaggaggtgtgcactcaccttacccaaatcccagccggcctgattgtctctatttttatggtcatacttaatttagagtaccctcgaaaaccatttcattgtgccttcattccatcctggctgctttctgctgaaactacagtcgtgcactgcataacgatgtttaggtcaatgatgggccacatataagatggtggacccacaagattataataccatatttttactgtaccttttctatgtttagatacacaaatacttacttctgtgttacagtcgcccacagtgttaggtgcagtcatatgttgtacagatttgtagcctaggagcaataggctaaactacatggcctaggtgtgcagtaggctatgacatctaggtttgtgtaagtacactctatgatgttcatacaacgatgaaaccatctaacgacacatttctcagaacacatccctgtcattaaagtacaaaccctcattatatcatgtctgactattccaaacgcctcttcaatatggtaactaaatttgtattagaaacatatattttgtaaaatacatgcttttatgctttatattttttcctctaagtgttactgtagcatgtagttggtctaagagggattttccaactcgaaggatgacagatgggaatcacatgactctggggctccagagaattgtgggggcagggaatttattattgcagttcccatgatgaagtatctatgatgacagagaagggctttgggtatggggcaggaaggagaccaaggcggaggagacgcacagagggacaagcctgagggacgctgggacagaagcaagcactgggatacttgttttcacaatatcttttcccttctattgtagttttctattgtgtctagtacagagtgcactccataaatacttgtaaatttgtacatgttatgattttgttctcacatctagctcaccatgtctcctctttcttcttcctctgtgtattccttacctcttctctctctgtgtgtctgtctctcatttctttctcttttgcccctcctggcatgctttcccctgactttgcgcttctctgcactcctggcttgctcctctgtttcacccgctggcttgctccttctctgcatctccctcccctcttattctcctaccccacagctcactgtctgcaggctgccgaggaggctgcttcacctacaccatgtctcgaatcaacttgcggatccgggagcagcttttctcctccctgctgcgccaggacctcggtttcttccaggagactaagacaggtggggcctggagtccaggtctgagattcccatggacatcccttgcccctcagtgaccttccacccacagcctctcctcctgccttcacccgtatgccaggacctggggatgcttttctcttgtttgggacagggtggagaagcagcctccactgtccctctgcaagtgaaggaggatgttcagaggagggggctgtgtcagagggaacggtcaggagggagtttctgggggccctgcagtacacatggtttcctttttcctcacctgctctgtccttcttaggggagctgaactcacggctgagctcggataccaccctgatgagtaactggcttcctttaaatgccaatgtgctcttgcgaagcctggtgaaagtggtggggctgtatggcttcatgctcagcatatcgcctcgactcaccctcctttctctgctgcacatgcccttcacaatagcagcggagaaggtgtacaacacccgccatcaggtgagcgtgcatgtaagggaaccccaaagggagaataaaactgacaggtgaggaggcttccacatttgtggctagaggatcccctagagagagatgttctcttctcagccattaggggagaaggtatattgtagtatatactacattttgtttgtccagccatccaacaatggatatttgacttcagaagattcatgattctccagaactgtaaacaaaaatgtaaagtgtatgtgaaggtatgggggagggaataggaaggggagatgataggcgatgataacttttcattagcttctcaaaggagtctgtacatcccccgcccccactgcgaagattaaaaatggtttcttagaggcttttaggcagggagattttccctttaaaatcagcagaagaagtctggatgcagcatagggaaaggaggcgtcatcaggaagtcctaagtctgaatgtcagctccaccttctctttttctcttatattgtggtaaaacatacataacataaaatttaccatttcaaccatttgaagtgtacagttcagtgacatttaggaaacccacattgttattgggtagccatcatcaccatccatctccagaacttttttcatcttcctaaaatgaaactctgtacccactaaatagtaactgcctactacccccaacccctggccgctggcaacctccattgtaccttctgtctccatgaattgtgatgactcccggtgcggtacgtaagtggaaccatacagtatttgtctttttgtgactggcatattttacttagcgtaatgtcttcaggcctcatccatattgtagcatgtgttagaatttcctcccttttaaggctgaataatattctgttgtgtgcatatatcacattttgattatccattcatctgtcaatggacatttgcgttgtttccaccttttggctgttgtgaattatgctgctgtggacatgagtgtacacctgtttgaaaccctgcttttggttcttttgggtatatacttagaagtggagctgctggatcatatggcaattctatttaacaatttttgaggaaccatgtattagtccatttttacgctgctgataaagacatacccaagattgggcaatttacaaaagaaagaggtttattggacttacagttccatgtggctgggaagacctcaaatcatggcggaaggtgaaagacacatttcacatggcagcagacaagagaaaagacagcttgtgcaggggaattcccctttttaaaaccattatatctcgtgagacttattcaatatcacaagaacagcatgggaaagacttgccctcatgattcaattacctcctacccagtccctcccacaacacatgggaattcaagatcagatatgggtagggacacagccagatcgtatcaaaccaccatacagttttccatagcggcagcaccattttaaattcccaccagcagtgcataaggtttccaatttctccacatcctcatcaacaccactttctgttgtctttttttttaatagccattctaatggtgattaggtgattaggattatctcattgtggttttgatttgcatttccctaatgattagtaaatattgagcatcttttcgtgtgattttggccacttatgtttctttcttgaaagaatgtctgcaagttctttgcccattttctgatttttttttaagttgtgggagttcactatatgttttgcctattaatttcctatcagatatatgattcacaaatattttcttgtatttcatggttgctttttcactctgttgctagagttctttgatgcacaaacgttttaaattctgatgaagtctgatttatctattttttgttgcctgtgcgtttggtgttatatccaagaaatcactgccaaatctagtggcatgaggcttttcttctacattttcctaggagttttatagtgttagctcttatgtttaggcctctgatccatttggaattacatctccacctttcttaactatctgtggctccttgggaaaactacccttctttcctgattcagacactggggatgggaaaattacctcaaatgaaggttaaaaaaattgcatgtatctcctatactacctaacactgagagctcaataatattttgttcccttgctccttcactcttattccttctggaaagaagagtaaggaagagggagagaaacagtttggtatttttaggtagactagggagcatctcactggctggagtaagatgtgggggcctgctgtctttgcacatcagccctggtgtttgctggccctcttttccaggaagtgcttcgggagatccaggatgcagtggccagggcggggcaggtggtgcgggaagccgttggagggctgcagaccgttcgcagttttggggccgaggagcatgaagtctgtcgctataaagaggcccttgaacaatgtcggcagctgtattggcggagagacctggaacgcgccttgtacctgctcgtaaggagggtaagataccagagtggttgtgaaaggagcccaggaaagggggagggcaagggaagaggaaactacagctggttctagaggcctttgcagctcagtctcatagaggcagagagggggaaagaatgggaagattcccagcctcatctctttcttctcctcttccaggtgctgcacttgggggtgcagatgctgatgctgagctgtgggctgcagcagatgcaggatggggagctcacccagggcagcctgctttcctttatgatctaccaggagagcgtggggagctatgtgcaggtgagcgagaagccaagcctgctctccttttttccctctctttttctttgtggactcctgggccttgggctttatttgttctttttaacaatacaatacaaaaccaaaacccgcaagtaattttgctatggagaattttaaacatatgccaaaaatgagacaaaataatattacaaactcacatgtatacatcctgtgctttaacaatgatcaactcatgcccaatcttgttggatctgtatccccagccacttccccccacccatattattctgaagcaaatccaagatattgtatactttcatctgtaaatatttcagtatgtttcttaaaaatacaaacatctttaaaagtgtataacaacaaagccattatcacaccaaaaaattaacagtagttcttaaaatttatcaaatagtcaattgtcaaatttccacttgtggtatccatgtagtatatgtgtatgagtgtgtttattatactttgcttaaatcaggatccagaaatggtccacatattgtgactggttgatacatcttttaagtctgtctgtctatctatctatccatccatctatccatccatccacccatcaatccatgtatctgtctaaaagtttcccttgcacagtttatttgttgaagaaataggttgtttgtcctgtggagtttcttagggtctggattttgttgactgaatccctgtggtattatatgctcttctgcctctgtacttcctgtctattgatagataaacctagaagcttgtgagattgaggggttttttttggtctttttccagcaacagtactttttaggtggtgatgcattcttcctccaagaggcacacaatgtctggttctctatttgtggcaacatcagccactgatgagcagtacctacatccatgacagaattagggctgcaaaagggagatactctatcattcttcatgtattagctgaagtagtctatgaagggagacttcccctcatctaccatttcattacccggtggtacagtttgatgaggaaaggcagagtgagcatttagatctcttcctacatttaccagttctcaaaaacagctacttcatccagggctttatttaaacattttcctagacacttgataaacatcttttttgtgtagagaactgcgctgggcactctgacggctacaaaggtgagttgggcacagtgcctgcatttaaggagctccccgtctaatcaagcaagacagaactgggcacaagtaataggaagcagtaactgaaaagatctggggctagaggcaatgctgtatggtaggagaagggactgtatatcctttatattgcaaattggaacactggggtattggtgccacttttaaattccgtccaaattgtacatttaaaagtggagaatctcttttgagtatggaggaggagcagtgcagttgtgagtggagtgtgtgaggagttgggagggtggtttctggtagaagtgtgtttaattagccggctctcccattcctgttttccagaccctggtatacatatatggggatatgctcagcaacgtgggagctgcagagaaggttttctcctacatggaccgacagccaaatctgccttcacctggcacgcttgcccccaccactctgcagggggttgtgaaattccaagacgtctcctttgcatatcccaatcgccctgacaggcctgtgctcaaggtgcctgaaagagggaggaaacctggacccttgctctctgctgctaatgcataattggacatcacagcctatagttcatttgcctctgagaacctggtcttgcctctgctaagaagagaaatggagggattttgagggagaaggggcaggcccttaactctttttctggttttctaggggctgacgtttaccctacgtcctggtgaggtgacggcgctggtgggacccaatgggtctgggaagagcacagtggctgccctgctgcagaatctgtaccagcccacagggggacaggtgctgctggatgaaaagcccatctcacagtatgaacactgctacctgcacagccaggtgggtgaggagggagaagacaggggacaggagaggggagcatgtacagagagaggatgggagatccacgggaaggcgcaccaggtgttcattctgagggaggtaggtggggaggacaaaagggcccctgccttgggggtttacacatagtcctctgcccctgtccctgctgcacaggtggtttcagttgggcaggagcctgtgctgttctccggttctgtgaggaacaacattgcttatgggctgcagagctgcgaagatgataaggtgatggcggctgcccaggctgcccacgcagatgacttcatccaggaaatggagcatggaatatacacaggtatcttctacaaattgtaagcttgctccttcagtaaaaaagagaaaatcagacttactcttagtggtgaaggtcgtgtccctgtagcttgatgtttgctgttcctctgccctttcctccattcctacgtctccttccccacacactgaattcttcagcctccctcttgatcaagagtctttgtttgcagagagcaatgcagcagtggtgctccctccatgggcagccccgtcaggtccccaccccatggccctcctcccactgggccctccccgcactgggccctcccacctcccgaggtcctactggaagtacctgctgtgcacttgtccctccttgtgtgttgtctgtgtcacttgtatctgaggaagggaatttctctgatttcctcagatgtaggggagaagggaagccagctggctgcgggacagaaacaacgtctggccattgcccgggcccttgtacgagacccgcgggtcctcatcctggatgaggctactagtgccctagatgtgcagtgcgagcaggccgtgagtaccgtgagagggcaggggacagtggggcctgggaggggcatgctgggaggatcagactgtgcagaattgggcagagggaggacgaaggacctactagtggaaacagtctgtgccttcttggggttggggaatggaatccggtggtgtgagggcagccccagttccctcctgggcttccattcctccagctgtggcagtacagccgggagagaagggcagtccaggcctttatctactgccctttcctaccttcttttatttcacaccttctttaccctaaatcataagagatggtgcccaggtggatgtggtgtccatctcattcctgtctttctgaggcactgtgatcaccccttcagctgcaggactggaattcccgtggggatcgcacagtgctggtgattgctcacaggctgcagacagttcagcgcgcccaccagatcctggtgctccaggagggcaagctgcagaagcttgcccagctctaggagggacaggacctctattcccgcctggtgcagcagcggctgatggactgaggccccagggatactgggccctcttctcaggggcgtctccaggacccagagctgttcctgctttgagtttccctagagctgtgcggccagatagctgttcctgagttgcaggcacgatggagatttggacactgtgtgcttttggtggggtagagaggtggggtggggtggggtgggggctgtctgtgtccaggaaacttaattccctggtgactagagctttgcctggtgatgaggagtattttgtggcataatacatatattttaaaatattttccttcttacatgaactgtatacattcatatagaaaatttagacaatataaaaaagtacaaagaagaaaagtaaaagtacccattgtttcacttcctggagataaccatagttgctattttgctgcctgtcccatcagtcgtttatctgttgtttgagatagaaattaaccaaaaatgacataaatattcatgagattgccttcctatatccttccttgttcctaccagtgtctgctattttgaagaagctagggtctggagggacagagaacagttccctgattaacagtattaatagcgacattggtaacagctaccatttatagagttttaatgggagtaggagctatgctaagtgtttttcatgtattatcgtttttaatcattatccccaaccctatgaggttggttattatccccattttacagatgaggaaactgaagctcaaagaggctcaatgactttcccaaggtggtcgtagtggtggagttggagtttgaacacaggcctgaccctagagtccacaccctgacccaatcaattatattgcatcttgggtccataaaccctaatccataatcccatcaagaaaagctctgctgctcttagctctaaataattcagaatctattctcttctctccagtcccgttgttatagtcttcactcatagacttaagatgatcccatcaccagagaggtttctctaccattagcttccctcttccggccattcttcacaaagtcatttttctaaattctgtgtcacatacgatgatggcatttctggaaattccttcaggtgctctcaagccctgctgcagagatccttttcagagcacacactgttccagcccatctgtctcaccctctcctgttgtatccagctccacgacaaactttctgccttccccaacacctttgtgcctttgcatatggtgttttcttgcccattttctgctcgactcgcccctgattttcaagttcaagacttaactcagggttcaggtcttccaggaggccttacttatgtcgtcagtctggggaactctccatgtgcttctatcactgtgcggttacctctttcacagcccttttaaagttctatcttccctttcccaccttttttgaccttccactagaccatgagcacctgggcggaaagccatatatcttattaagctttatatctgctacctggccgagggctaattcatagtggagaataaatagtcaattgaataaatgaataaatatctccaccatcgtactaatcttaatcctccctgcccactcccaccactgaaaatgcaacattgtacacatcactggttgttgggagggacttaccttggaaagttgctattctaggaaagagaaaccttcatattcctggaaacagcaggtagtttccagtgctggcaatgaattccccagaactgctgttttggattttttcttgcctggcagctgttgggagcagggtgcagtgaggatggagtgagagtgggcagtttcttgtgcagatttgcctttctttcatcctggggctgacttgcagctccacacccatccatctctcaaatttcacagagggtaaaataggcatttggagagaaagaactctggcctgattcctttctctcccacaaatgtcctttattcataaaacaggaataataattcctgtatctcccaactacatggaagctgcagccctcacagaagaagatgatctgagaaattctttgatttcctcagtacagttatacccatgcatcataatactttaagcctggaaggcatcttaaaaataatgcaacagtcaaacctaattttacagagaaactgacatgaaatcacgcagctaatcatgataaagctgggtggaaaacttatcttgatgggcagtacaggaagatgcagtagaccttaagatgtcctgaaagtttcttatctcaggggaaactcccaggtaggctttatgtcagggacacagaaaaatgctccctgaaagtcaaaatattcgggctagacagacaaattcctgtaagtgtggtttgtctgggaaccacagatgtcactaatcctggtttgctccagagttctttttgttcactcctaccccccatcaccatttgattgatctccttaccctgtaatttccccttcttgtcgcttacctgcagtatctttcccacccaggcatgccttattctttctaaaggaaagtatgaatggagaggggaaagcttgggaaactgatagatttccttggatgccaaaacacctccatagcctgtctgcccggccctatgtggaaacagcattgagtttcaagtcctttatgcctccacccagggatagccacttggaatccacatggcaattgtgaaacaagcaggaaatgcgtaattgtcagaattttgtggggaaaggactagggaataaggaaaacaaagatcttccttgtgttttagagctgtcagctagaggagcacctgcttgagtctgatgccatctaatggtcccagaagaaactgggttttgaacctagagttccatggactcttaggaattagactcctactactactaagcattcactggtgcttactatgtgctattgctgtgccaagtatctgaaacctgtcttcttaccttatttttcaagataattctatgtggcaggtattactatctcaattctaagagtgagaaaatggagttttagaaacatttactaacttgcctgggtcacatagctaaggaagaggtggacttgcccagctttgcataaaactcctcaaaagagttgcctatactccctgactccacttatcttcctactatcctctttttaaaatatattatttatttatttaaataagcaatatatgaatgtggtttgaaattcaaaagacacaaagaagtatacagaggaaagcctcactctcaatccttctcaaggtttgctaattcctcttgcataggcaatccgttcttccagctttgtgtttatctttccagagaagtttactgtgtattaagcaaatatgtatatctttattcttgctcagtattttcgcaaacagcagctgtctaagttcactgttctgaactttattttttaaattaaaaatatatggctatgtagtattctattttatggaagttccatatttcatttatcctgtttccttctactgatggctagttaggttattggaagtcttttgctgttgctagttagtcttgtatagacattgtaatgcacatgtgcaaaaatacaagtatgatacaatcttaaaggggagttgctgagtccaatatatacattacaaatattgatagatattgcaaaattgccttcatagaggctgtattaatttatagttccagcagcaacatatgagtttatctgtttctccatatatatatatatgtatataaccaacagacagtgttaatttttaaaattttgacaatcttctgggtgaaagtagcattgtattgtagttatcatttgctttttaatattatcatgtaagtaacagagatactaaacccagaaggataagggagcaaagatgagaaaaataaacacacacacaaacaacaataacaaatctgtctaaaatattggaaaatcagaatgagaaatgaaatatgactgtaacgataaaaatcagtaataaaaatgactattaaatttaaaaataaggcagagcaaccacaagtgacatgagaatgaggcagacaaagttaaagcacctaaagtctttgtcttgtttgaaaggagggtagagatattgattaccttcagatgctgccacatttggtaaacatgttaaaaatataagactgacttttaactaatataattagaatttaaaattcctaaatcagtaaggggaaattaaataatactttaaataaaaatgtaattgatttaatataagtgatgcaaggaaaacaaaagaagcaaagtaagacatagcaaatacagagcaccatatattgtaacagaaacgaatgtaaatagcacagtgatcacaagtataaatagcttaaatatgggagttaaaggaaagttctcagattagattaacaatatcgcaaaatccagttatatgcccttcataagatcacaagaaacctaaaaacatgaaaatgttaaatcaaaaccagatataagatacacaaagcaaacactaacagaagacagaaagacagcttatgtaattacagaaatatctaaacatatagtctaaaaccaaaggcattagtaaaaacaaagacagccattacatagtgataatgaagtcaccagaacattatactaaaactgaatcagtttgcacctagcaataaaactacaaaatatgtaagaaatataggagaattataggaagaaattaattgagaaattgaaacacatttctcaatgattatagaataagtggaaaaatgaataaggatatcaaataagcctgttgatgttcttgtctgtaacatctaggaatcaaaatatattctttaaaactaataaatcaagtgctcgtatttacacatttaagactacaaaggtagacacacacacagaaagaggaagggagaggatatgagctagttttgtgattgttcattatttaaaactaataggaattatctaaaggaagagggaactaagtgtattatatacaaataaacttatcaaagcaaccttgaaatatacaccttccttaatatctgaaaaggtaaaatttttaaaatgcacaataaagacatagtgaaagatttttaaaaatactcatgtaaacattatacttaacagaagttaatatctctgaattagactgaatctatttgctgtatgaataattataaatgggcttcttaactgaactaaataaatgaaaatatttttaaattagattaagataaaaactctattatttgcaatatgcaaaagacacctaacataaagccactcagaaagatgtattcattattttcaacaaataagatgatgggcaaagacataacaagagaaggcaaacaaaagggaagcagaggtcacattcgtcttaccaaacaagatgaaattcagacactcctcaccaaaaaaaaaaaaaaaaaaaaaaaattgagtgtgacagaggcacttataatgtaaagtataaaattcatatgaatatatgagacatgtgtttaagttctaaataccaaataggtagctcttataaagcagaaattaaggtagatacaaggaaaatattcagaaatgtactaccaatagaacactttaattccctttccctggactagaccagttaagtggacaaaaaaataggctgggcctggtgattcatgcctgtaatctcagcactttggtaggccaaggcgggtggatcacctgaggtcaggatttcgagggcagcctggccaacatggtgaaaccctgtctctaccaaaaatacaaaaattagctgggtgtggtggtgggcgcctgtaatcccagctacttgggaggccgaggcaggagaattgcttgaatctgggaggcaaaggttgtagcgagccaagatcgcaccactgcactccagcctgggcggcacagtgagactctgcctcaaaaaaaaaaaaaaaaaaaagtatgaacacagaagatagaagatattactatcaataaaaaaatagatatgctacatctatatcaaacttttaaaattgaaaatagaggccgggtgcagtggctcacacctataatcccagcactttgggaggcctaagcagtcggattgcttgaactcaggagctcaagaccagtgtgggcaacagcgaaaacccgtctctacaaaaaatacaaaaattagccagatgtggtggctcgtgcctgtggtttcaactacttggctgaggtgggaggatcgcttgggcccagttcaaggctgcagtgagctatgattgtgccactgcactccagcctgggcaacagagtgaggccttgtctctaaaacaaacaaacaaacaaacaaaaattaaatggctcaatggcatagaagaaaatttttttatgaagcaagtataatattgatgttaaactatgacaatgcacaaatataaaaattgtagatgaatttacttattatactgacacaaaaatcctaaataaaacattgcaaacagattctagcacagattaaaaaacacccattaagatcaaggggttttttttgttttttttttctagaaaaccctttggaagttcatgatattttgaatttcagtggatatttcctgggaataatgagttcaaatgaacgaatatgtggaacaaagcatcaccaacatttattttttcaggatgaggtgatggacaaaaccatcacagggaaattgaggcaaatagtacatgtaaaacaatacttcgggtgagtccacctatcccaaagtcgtatcaaagaagtggctgcagattggagcccaaagcctttggttcctcagtttccaaatggattctcactaggtgggatcatgagtttgctttggacaccccaaattctaactatttcttttgtttcttacatcctttccctcttccccagccccttcccctcatgttacacctcttgctggtttgagacgtcaatcaccactgagaaagaattaaaccagtattttgagctggcaaaattcttagcctagtacaattccttcaattaaactgtagctcaacaatgtgttctctaaaagtatgatttaatattctacctagaaactcagaatatttttcataactcctccagggcagtgtggattatgttgatgtgttaggaggaagtagaaggaagaaaatgaattgagatgtacgttttacttccatgtcaaagtcaccaaaatagcagttgaagggatatttgtgtcaggcaatagggagaataataattttatgccaccctcaaaaaacaaccacacatacacccaaattctctcactcctcagagaaaggggaaggaaagaaaagagagaagcaaaatatgagcttgagtgaaaaatcacagaggagcctgtagctatttagggagggctgctggctgaagtcaggcaggaaaaaaagatcaaaacaccctgccctatttttcaggctcgttcaagtagaagacaaaaacataaatacaggagaaaggaagaaaaccacatctttttcctcttgtctccccagaactgaacagtgtctctgataagcccaggcccttctatcgtagacactgacactatgcacagaaaatgactcaaaaacgcttctaatgggggtgaatctgatgcttcagtttatttaagatgtaccagaggccatctaaggagatccatagcttgctaactgaagcttattgctttctcttcttagttcccatgccaggctctatgccattccttgcttgtcatgtgagatcactgatttcctttggttaggtaggatatgatttccttacagagatctgtcctgacaccaaacagctatgatgaaattccttggttattttccctttttgtgtaccttatcattaccggaatgctaaagctgtaggaataaagtttccctggcttcccaagaaatacagtgtgacagaaaaagtatagcctagggacttactagttatgtgaactttggttcattccatccttacctcatctgtaaaagggagatcatgatagtatctactgcaaagggttttgtgtgatgattctctctctttctctctctctcatacacacacacgcacacatttatataatgcttagaaaatgaactcataataagcaattgacaaacattagctattattatgtaggcaagtcagattttagagtttgtgagccttagacacatttacagagaagaaagagcagccctcctaactttctggtccagcgccatatcctccacttcctccccatccccacatcccttgccatttatcaaccccctctctcctctaaatctaaatacaggcccccgtttgatccatattgtctaggcccttcctctcctctccacatggcccttccttcagctctgagggaagctgcagaagccagccatggtgctgtctacaaagaaggggacacacgcctcttccacccgctcatgctgttactgcatctgatcatctccgtgccgtgtccttgttcacttagcctgtgttgagtgtttgtctccatttccaaatgcaataaaacatctgggaaagactaaggtaggtgtgggcaggaagaagggaggaagttagacccagtggcttgagtgccctctgatgcctccttatcctcggctccacacaagccctcgccagtgtgagctccacagccatccacctggaggaggagtactcaaaaccagggtcaaatgccttgtactcgggggtctaccagtaagcctgtggccagccttccacttcatgaatcgtcacatttacatgagagatgtggagggagaggggtcagcctcctagctcctgtcctgtagcagttaagtcaagtcaggccaggctgtggtaaccaagccagtaccttctttaaagaacagttgtttctcattcatacagagtgtgttgtaggtgtgagtgattccctggggcagctgctcttcatggtgactcagctaattagactgcttttctactgggattgtgccatctcaacacaaggctgtcttggttgacttggtaggggaggaggagaagagtcatgcacgaggagttaaattctttgaccaggaaccttttgttcactttccattggtgagaacgagtcacacagctccaggagagtaggaagtctagtttctcgttttccatgggcctaggaattagaggatgaacactagcgatgtcttccacgtcttgctctctttttctttacctgttataatctcccatggagaagaaattatttttctgattggtctgatccaggcctctaaccaagggcatttactaagggtcatagaacagtaaaaggttgcacaattgcatctcacctctcttttctgaatcctgcttaattaaaactttaaaaactcacttacagaccacttcttgctcttcttagttatcaaatatattttcttccaactcctttttgacagatcttgccttgttctcagctgactcccttgcaaccatctaaatggaacttcctcattcccctttatcccctgctaatcgtcctgtctttattcttttatctgaagaagtgtacccttcttcccccaagccttatgctctctgtcttagtccatttgtgttagtgtaacaagatacacgagatagggtaatttatgaagaacagaaatttatttctcacagttctggaagctagaagttcaaggtcatggccctggaagatttgatgccttggccatcgacttgaaaaaagtcactgaagtgaacttgtggttaccatgataccctgggttcattcttaacatgcacagtataggcaaatcaggggcacatttcatgctgaaagatgatgtgaaatgatgagtaaacattgccctttaaataataataacatagatggtgaattacaatttgcacttttggttttatttgcttaaagatagtgttttactgtctaggttttactgaaagaatacttaactaaacacttgagtcaaatcattccagtgtaacagtcctcacaaggaggaaggcagaagggcaaaagtgccaagctattgcctccagcccttctatttttattgattgactgattgattgattgagacagggcctcgttctgttacccatgctggagtacagtggtgcattcatggttcactgcaactttgaacttctgggctcaagtagtcttcccacctcagcctccaaagtaactaagaccacaggtgcatgccaccatgtttatttctttaattttttaaattttatttggacatgggggtctcactatgttttccaggcaggtctctaactcctagcctcaagcaatcttcctcctcagcctcccaaagtgctgggattacaggcatgagccatcatccctgctctctctagccctttttaaagtctctaatcccattcaggaggcctctgcattcatgacttaatcacctcctaaagggcccaccttttgatactatcacattggtgattaaattgcaacacttgaattttgagtgacattcagaccacagcattttggagaaaatgtcccctttcttctcttttttctcttcagtttctcctttctacagataccttgcacttcacttgcaaccttgttgaagtctctcctgtcttaaaagtttcttttcccaaaacaccagaactcattccttctgtctaactgtaactttgtacttgttaccaacctctacccatttctacccctgactccccagcctctggtaactcctaacgtactctttacttcgatgaggtcaacttttttagattccacatatgagtgaaatcacgtaatatagtccttctgttcttggcttatttcacttaacatagagccctccaggttcacccatgttgttgaaaatgacaggatttcatgcttttttatggcggaatagtattccatcatgtatatatatcacatactaattaccctgatttgatcaatacacaatgtataggtgtgttggaacatcatgctgtaccccataaatatgtacaattattacgtgtcaatttaaaaaacccaagaaaagtattttttcttagtgttgtttttttctaaagtgtatcccattttttcctttgttttcactttcaaaattcttgaaagactattttaatctgcggcctttgttttcttgtttccaattcattcttttgaaatatggcttctacctttaacactctgctgtcctcttgaaggttattggtgccctactaaccataaaacacaataatgctctcttagattgtatcctggtgagcctttttgcaaaattttattctttgagaattctctttccatgttttcttttcttttctttttttgtggtcattttggcttataggaaatcgtactctccaaatgttctctatgtcttctatttcttctctgataatccctttactaaatcttcttgaggcatatgcttcagaatgcttaatttacatactcttaattccttcttaatttacacactgcctgtcggcaatgtcaacacccaataagaagggagacctattggtcagaacaggccagggaatagaagaatacataataaacagtctgcctagttcttctagggccccataatatgtcaaacatatatttttacttcttctcccagcccatttttagtatacctaaattactgtcagtgattctgcaggcaaacaatggttgagttgtatgacacaactttgtgaaagtatcctacccagtacctgatgatgcaaaactcttctatcttgattggttgtcaatctgaggagtttccaatcctggggaagccagaaaaacagcgatttatactcttaatgggtactttctgactgaattttatgagctcattctgaagaggctgacgattttactatctcatttttttcctttctccagaatgggttctgggtgggtcccctgggtggtggctctgctagtgaatctgacccgactggattcctccatgactcaaggcacagactctccaggtaagaacagagcaattgtttttttccagtgtgtatgcaagaattggcatgggggagtgatgcctttctttgtaagtccaggccacagaccagactggaagtggcttttggtttcaaagaacagtgttcttccctttggcagaaaggtacgccttgcctctttacatgggatggacttcatataccagagccacctattcaaggggtagggaggcaggaagagggaaacattgtgtcttgtttaggatccttattgtgtatcaacctcagtcagtacctaggcgtgttgaaggcctggcttgggttcgagcctgctgggagaaacaacctgcagtaggctgggtcacagaggcaatctgtgattttttggtcaggacacggaaacaaatctcagttggggtatatgtggacaaatgaaactggaaacaaaggttgctccttctgtcatttattaagccactattatattgtcagaattgtactaaacagttttgagaagtaagagaagttgaatagaatacattgtccttgtcctccgcacnaggtacaagttacttgtcactgttatttttcagcacaggtgacagaatatgcagccatgagcaatgtgagatgaagcacatattaatgagcagaaacaggatgtaatgtgctaagaacagaatcccctttgcatgttagtttcattaaatacaaaagaggaatcaaacctggccaggagagatcattattcttagagaatagaaaccgccctgagtttataatgtccattaaacaatacaactgaaaaaaaaatcagcacagatgttaaatgatgatgaaaaattcagatttcccccctagtttagactactagaggaaatagagaagagtatacatgctgagaaattacaggctggaacttcatctgaaattagctactgagtgagggataagtggggttcacctaggaaggtcattcttatggctcagttggaggcttcgaacttagaaaggaaaggtaaattacaacccaacattaatagcaattatctttcaagtcttgacttagatgcaatgtcttcaggacgtccttcctgacttacctacattattaactccatttgaatttccatttttattgtagttggtgtggccgcctaaccagtcttgggggtctggctggtttggtttaatttacccaagtgttcacagcacattgtaattattggcagtagtgcaagactctctcatctcttctcttgcctccgttctcattctctcccctccctggagaatccattctaaacgtgtctggtatgtctctaagtatgagagtggcttttagaaatatgtagcattattgctctttatgtgtttttaaaatttaataaatgtcatttctctggttgaatcccattctgtttcttttctcacttgacactgtgctttttgagcatactgaggtcaaggcctcttagatccatgtggtctgacgtaatttaccaggcatgggttttcccagaggagggggctggttcatggttttggttttggttttccagaagattttgtgattcaggcaaaggctgactgttacttcaccaacgggacagaaaaggtgcagtttgtggtcagattcatctttaacttggaggagtatgtacgtttcgacagtgatgtggggatgtttgtggcattgaccaagctggggcagccagatgctgagcagtggaacagccggctggatctcttggagaggagcagacaggccgtggatggggtctgtagacacaactacaggctgggcgcacccttcactgtggggagaaaaggtgagctggaagctgaggtctggcggggctcaggaatgtcccccatgtgaaccatggctcttctttcttacaagcaattttctgcttttaggataaatggttgtctgtgtagatgttctggccccagctgtgatatattatcctcacaagtcagccactgtgatcttggtctcagacccccaaggttctcagggacttcgagggctattgtaccctcaaagagaagcagtaattgtgggagtacctcagaaagtctaaatcctcctgacaggcattgacataccctgttactgatcttgggggctgagacttgcctatactttgtgttcacttgggtgacctgggaaagagattagacatagtgatagtccctaaagaatctcctgtcccagcttggtggttttctttcacggtgtctcatttttcctcccttcctagtgcaaccagaggtgacagtgtacccagagaggaccccactcctgcaccagcataatctgctgcactgctctgtgacaggcttctatccaggggatatcaagatcaagtggttcctgaatgggcaggaggagagagctggggtcatgtccactggccctatcaggaatggagactggacctttcagactgtggtgatgctagaaatgactcctgaacttggacatgtctacacctgccttgtcgatcactccagcctgctgagccctgtttctgtggagtggagtgagaattagtttctagtactctctgggcctgactcaggactatactgactcaatacagagcctgtgtcacttctgcgtttatcttggtcacaacatgaattattctttcccttgatctgggaacagtcacgaaaccagagtccttgggttagggtgggagaaaacatggcagatatctatcctcatatcttccaagaaatgaggagatctaatcacctcattatgtgcttccaaccctatgaactggtgtcctctaattctttggtcttagtatttaggaggcattcttatgggctgtgagaatctgtaaccgatgggtggtaactccatgggtgccactttggtttcgaagaaccttttctaaatttatttatttttctctagctagcattggatttggtgtctagtacagattctgggattccaagaaagtgctttaaatattgggatatttttactaatttaaagacctgtttcccataggagctcagtctgaatattcttggagaaagatgctgagtggcattgcagccttcctacttgggctaatcttccttctggtgggaatcgtcatccagctaagggctcagaaaggtaatgagcctgtgaggagtgccctgccacctgtcccagaccttccccactcccaccttccctaacgtcaatgatctgaggcaaggaaagctgattgtgcctctcagggatcaccgggataatttttttctgaagctagaaatgggataagcagagagagtgctgaccttgccagccatttgttcttccctcgggataatcatattgggtcctaattggggcaatccattcttttctcgatttctttccaggatatgtgaggacgcagatgtctggtaatgaggtaatgtctctttttccttgtctttgagtggcagatcattctcccggttctttggccagagggagatgacatgggggtagggaggagtaaggttgctgctgtctagatgggactgtcccctgagtctctggaacggctgtggggggtggtgaggctgcctcctgagaccttcatcactgtgcctccaggtctcaagagctgttctgctccctcagtcatgctaaggtcctcactgaagcttctctctctggagcctgaagtagtgatgagtagtctgggccctgggtgaggtaaaggacattcatgaggtcaatgttctgggaataactctcttccctgatccttggaggagcccgaactgattctggagctctgtgttctgagatcatgcatctcccacccatctgcccttctcccttctacgtgtacatcattaatccccattgccaagggcattgtccagaaactcccctgagaccttactccttccagtcccaaatcatttacttttctgtggtccagccctactcctataagtcatgatctccaaagctttctgtcttccaactgcagtctccacagtcttcagaagacaaatgctcaggtagtcactgtttccttttcactgtttttaaaaaccttttattgtcaaataaaatggagatacaaaaaatgtacattttagtgaattatttaagaaaaacccctgtaatcaagtcaaggaacaggactttgccagctccagcagaagtctctgtacgtcaggccaatcaaagcctctccttcccctcgaaagtgaccatatcctgattttattgtaacctctttcatgtctttgtagtctagtcccccaggtatgtgttctggacgccacagcttagttgctttacgcctaactca

SEQ ID NO: 1061 - DNA, 2797 bp, Homo sapiens
ttccccagcattcgagaaactcctctctactttagcacggtctccagactcagccgagagacagcaaactgcagcgcggtgagagagcgagagagagggagagagagactctccagcctgggaactataactcctctgcgagaggcggagaactccttccccaaatcttttggggacttttctctctttacccacctccgcccctgcgaggagttgaggggccagttcggccgccgcgcgcgtcttcccgttcggcgtgtgcttggcccggggaaccgggagggcccggcgatcgcgcggcggccgccgcgagggtgtgagcgcgcgtgggcgcccgccgagccgaggccatggtgcagcaaaccaacaatgccgagaacacggaagcgctgctggccggcgagagctcggactcgggcgccggcctcgagctgggaatcgcctcctcccccacgcccggctccaccgcctccacgggcggcaaggccgacgacccgagctggtgcaagaccccgagtgggcacatcaagcgacccatgaacgccttcatggtgtggtcgcagatcgagcggcgcaagatcatggagcagtcgcccgacatgcacaacgccgagatctccaagcggctgggcaaacgctggaagctgctcaaagacagcgacaagatccctttcattcgagaggcggagcggctgcgcctcaagcacatggctgactaccccgactacaagtaccggcccaggaagaaggtgaagtccggcaacgccaactccagctcctcggccgccgcctcctccaagccgggggagaagggagacaaggtcggtggcagtggcgggggcggccatgggggcggcggcggcggcgggagcagcaacgcggggggaggaggcggcggtgcgagtggcggcggcgccaactccaaaccggcgcagaaaaagagctgcggctccaaagtggcgggcggcgcgggcggtggggttagcaaaccgcacgccaagctcatcctggcaggcggcggcggcggcgggaaagcagcggctgccgccgccgcctccttcgccgccgaacaggcgggggccgccgccctgctgcccctgggcgccgccgccgaccaccactcgctgtacaaggcgcggactcccagcgcctcggcctccgcctcctcggcagcctcggcctccgcagcgctcgcggccccgggcaagcacctggcggagaagaaggtgaagcgcgtctacctgttcggcggcctgggcacgtcgtcgtcgcccgtgggcggcgtgggcgcgggagccgaccccagcgaccccctgggcctgtacgaggaggagggcgcgggctgctcgcccgacgcgcccagcctgagcggccgcagcagcgccgcctcgtcccccgccgccggccgctcgcccgccgaccaccgcggctacgccagcctgcgcgccgcctcgcccgccccgtccagcgcgccctcgcacgcgtcctcctcggcctcgtcccactcctcctcttcctcctcctcgggctcctcgtcctccgacgacgagttcgaagacgacctgctcgacctgaaccccagctcaaactttgagagcatgtccctgggcagcttcagttcgtcgtcggcgctcgaccgggacctggattttaacttcgagcccggctccggctcgcacttcgagttcccggactactgcacgcccgaggtgagcgagatgatctcgggagactggctcgagtccagcatctccaacctggttttcacctactgaagggcgcgcaggcagggagaagggccggggggggtaggagaggagaaaaaaaaagtgaaaaaaagaaacgaaaaggacagacgaagagtttaaagagaaaagggaaaaaagaaagaaaaagtaagcagggctcgttcgcccgcgttctcgtcgtcggatcaaggagcgcggcggcgttttggacccgcgctcccatcccccaccttcccgggccggggacccactctgcccagccggagggacgcggaggaggaagagggtagacaggggcgacctgtgattgttgttattgatgttgttgttgatggcaaaaaaaaaaagcgacttcgagtttgctcccctttgcttgaagagaccccctcccccttccaacgagcttccggacttgtctgcacccccagcaagaaggcgagttagttttctagagacttgaaggagtctcccccttcctgcatcaccaccttggttttgttttattttgcttcttggtcaagaaaggaggggagaacccagcgcacccctccccccctttttttaaacgcgtgatgaagacagaaggctccggggtgacgaatttggccgatggcagatgttttgggggaacgccgggactgagagactccacgcaggcgaattcccgtttggggcctttttttcctccctcttttccccttgccccctctgcagccggaggaggagatgttgaggggaggaggccagccagtgtgaccggcgctaggaaatgacccgagaaccccgttggaagcgcagcagcgggagctaggggcgggggcggaggaggacacgaactggaagggggttcacggtcaaactgaaatggatttgcacgttggggagctggcggcggcggctgctgggcctccgccttcttttctacgtgaaatcagtgaggtgagacttcccagaccccggaggcgtggaggagaggagactgtttgatgtggtacaggggcagtcagtggagggcgagtggtttcggaaaaaaaaaaagaaaaaaaggg

SEQ ID NO: 1062 - DNA, 1901 bp, Homo sapiens
atggggcatcggccggtgctcgtgctcagccagaacacaaagcgtgaatccggaagaaaagttcaatctggaaacatcaatgctgccaagactattgcagatatcatccgaacatgtttgggacccaagtccatgatgaagatgcttttggacccaatgggaggcattgtgatgaccaatgatggcaatgccattcttcgagagattcaagtccagcatccagcggccaagtccatgatcgaaattagccggacccaggatgaagaagttggagatgggaccacatcagtaattattcttgcaggggaaatgctgtctgtagctgagcacttcctggagcagcagatgcacccaacagtggtgatcagtgcttaccgcaaggcattggatgatatgatcagcaccctaaagaaaataagtatcccagtcgacatcagtgacagtgatatgatgctgaacatcatcaacagctctattactaccaaagccatcagccggtggtcatctttggcttgcaacattgccctggatgctgtcaagatggtacagtttgaggagaatggtcggaaagagattgacataaaaaaatatgcaagagtggaaaagatacctggaggcatcattgaagactcctgtgtcttgcgtggagtcatgattaacaaggatgtgacccatccacgtatgcggcgctatatcaagaaccctcgcattgtgctgctggattcttctctggaatacaagaaaggaggaagccagactgacattgagattacacgagaggaggacttcacccgaattctccagatggaggaagagtacatccagcagctctgtgaggacattatccaactgaagcccgatgtggtcatcactgaaaagggcatctcagatttagctcagcactaccttatgcgggccaatatcacagccatccgcagagtccggaagacagacaataatcgcattgctagagcctgtggggcccggatagtcagccgaccagaggaactgagagaagatgatgttggaacaggagcaggcctgttggaaatcaagaaaattggagatgaatactttactttcatcactgactgcaaagaccccaaggcctgcaccattctcctccggggggctagcaaagagattctctcggaagtagaacgcaacctccaggatgccatgcaagtgtgtcgcaatgttctcctggaccctcagctggtgccagggggtggggcctccgagatggctgtcgcccatgccttgacagaaaaatccaaggccatgactggtgtggaacaatggccatacagggctgttgcccaggccctagaggtcattcctcgtaccctgatccagaactgtggggccagcaccatccgtctacttacctcccttcgggccaagcacacccaggagaactgtgagacctggggtgtaaatggtgagacgggtactttggtggacatgaaggaactgggcatatgggagccattggctgtgaagctgcagacttataagacagcagtggagacggcagttctgctactgcgaattgatgacatcgtttcaggccacaaaaagaaaggcgatgaccagagccggcaaggcggggctcctgatgctggccaggagtgagtgctaggcaaggctacttcaatgcacagaaccagcagagtctccccttttcctgagccagagtgccaggaacactgtggacgtctttgttcagaagggatcaggttggggggcagcccccagtccctttctgtcccagctcagttttccaaaagacactgacatgtaattcttctctattgtaaggtttccatttagtttgcttccgatgattaaatctaagtcatttgaaaaaaaaaaaaaaaaaaaaaaaaaaaaaaaaaaaa

SEQ ID NO: 1063 - DNA, 5869 bp, Homo sapiens; identical to SEQ ID NO: 517

SEQ ID NO: 1064 - DNA, 1973 bp, Homo sapiens; identical to SEQ ID NO: 518

SEQ ID NO: 1065 - DNA, 1999 bp, Homo sapiens
acccttcgaccactgcctccctcggcccagccagctgtgccggcgtttgttggctacgctgcgcccgaccctccagccagccttctgccggccccgccgcgatggaggtgccccagccggagcccgcgccaggctcggctctcagtccagcaggcgtgtgcggtggcgcccagcgtccgggccacctcccgggcctcctgctgggatctcatggcctcctggggtccccggtgcgggcggccgcttcctcgccggtcaccaccctcacccagaccatgcacgacctcgccgggctcggcagcgaaaccccaaagagtcaggtagggaccctgctcttccgcagccgcagccgcctgacgcacctatccctgtctcgacgggcatccgaatcctccctgtcgtctgaatcctccgaatcttctgatgcaggtctctgcatggattcccccagccctatggacccccacatggcggagcagacgtttgaacaggccatccaggcagccagccggatcattcgaaacgagcagtttgccatcagacgcttccagtctatgccggatggatttgtcttcaagatgccatggaagcccacacatcccagctccacccatgctctggcagagtgggccagccgcagggaagcctttgcccagagacccagctcggcccccgacctgatgtgtctcagtcctgaccggaagatggaagtggaggagctcagccccctggccctaggtcgcttctctctgacccctgcagagggggatactgaggaagatgatggatttgtggacatcctagagagtgacttaaaggatgatgatgcagttcccccaggcatggagagtctcattagtgccccactggtcaagaccttggaaaaggaagaggaaaaggacctcgtcatgtacagcaagtgccagcggctcttccgctctccgtccatgccctgcagcgtgatccggcccatcctcaagaggctggagcggccccaggacagggacacgcccgtgcagaataagcggaggcggagcgtgacccctcctgaggagcagcaggaggctgaggaacctaaagcccgcgtcctccgctcaaaatcactgtgtcacgatgagatcgagaacctcctggacagtgaccaccgagagctgattggagattactctaaggccttcctcctacagacagtagacggaaagcaccaagacctcaagtacatctcaccagaaacgatggtggccctattgacgggcaagttcagcaacatcgtggataagtttgtgattgtagactgcagatacccctatgaatatgaaggcgggcacatcaagactgcggtgaacttgcccctggaacgcgacgccgagagcttcctactgaagagccccatcgcgccctgtagcctggacaagagagtcatcctcattttccactgtgaattctcatctgagcgtgggccccgcatgtgccgtttcatcagggaacgagaccgtgctgtcaacgactaccccagcctctactaccctgagatgtatatcctgaaaggcggctacaaggagttcttccctcagcacccgaacttctgtgaaccccaggactaccggcccatgaaccacgaggccttcaaggatgagctaaagaccttccgcctcaagactcgcagctgggctggggagcggagccggcgggagctctgtagccggctgcaggaccagtgaggggcctgcgccagtcctgctacctcccttgcctttcgaggcctgaagccagctgccctatgggcctgccgggctgagggcctgctggaggcctcaggtgctgtccatgggaaagatggtgtggtgtcctgcctgtctgccccagcccagattcccctgtgtcatcccatcattttccatatcctggtgccccccacccctggaagagcccagtctgttgagttagttaagttgggttaaaaccagcttaaaggcaaaaaaaaaaaaaaaaaaaaaaa

SEQ ID NO: 1066 - DNA, 6728 bp, Homo sapiens; identical to SEQ ID NO: 521

SEQ ID NO: 1067 - DNA, 5086 bp, Homo sapiens; identical to SEQ ID NO: 522
  misc_feature (1)...(5086): n=a,t,g or c

What is claimed is:

1. A process for screening a plurality of chemical compounds for anti-neoplastic activity comprising:
(a) contacting a compound with a cell containing a polynucleotide comprising a nucleotide sequence selected from the group consisting of SEQ ID NO: 1-1067 under conditions wherein said polynucleotide is being expressed, and
(b) determining a change in expression of at least one of said polynucleotides,
wherein a change in expression is indicative of anti-neoplastic activity.

2. The process of claim 1 wherein expression is determined for more than one said gene.

3. The process of claim 1 wherein expression is determined for at least 5 said genes.

4. The process of claim 1 wherein expression is determined for at least 10 said genes.

5. The process of claim 1 wherein expression is determined for all said genes in a given signature gene set.

6. A process for determining the cancerous status of a test cell, comprising determining expression in said test cell of at least one gene that includes one of the nucleotide sequences selected from the sequences of SEQ ID NOS: 1-1067, or a nucleotide sequence that is at least 95% identical thereto, and then comparing said expression to expression of said at least one gene in at least one cell known to be non-cancerous whereby a difference in said expression indicates that said cell is cancerous.

7. The process of claim 6 wherein said expression is the expression of more than one said gene.

8. The process of claim 6 wherein said expression is the expression of at least 5 said genes.

9. The process of claim 6 wherein said expression is the expression of at least 10 said genes.

10. The process of claim 6 wherein said expression is the expression of all said genes.

11. A process for determining a cancer initiating, facilitating or suppressing gene comprising the steps of contacting a cell with a cancer modulating agent and determining a change in expression of a gene selected from the group consisting of the gene sequences of SEQ ID NO: 1-1067 and thereby identifying said gene as being a cancer initiating or facilitating gene.

12. The process of claim 11 wherein the gene determined by said process is an oncogene.

13. The process of claim 11 wherein the gene determined by said process is a cancer facilitating gene.

14. The process of claim 11 wherein the gene determined by said process is a cancer suppressor gene.

15. The process of claim 11 wherein said cancer modulating agent has the effect of increasing gene expression.

16. The process of claim 11 wherein said cancer modulating agent has the effect of decreasing gene expression.

17. A process for treating cancer comprising contacting a cancerous cell with an agent having activity against an expression product encoded by a gene sequence selected from the group consisting of SEQ ID NO: 1-1067.

18. The process of claim 17 wherein said cancerous cell is contacted in vivo.

19. The process of claim 17 wherein said agent comprises a portion having affinity for said expression product.

20. The process of claim 19 wherein said portion having affinity for said expression product is an antibody.

21. The process of claim 17 wherein said agent is an apoptosis-inducing agent.

22. A process for determining a cancer initiating, facilitating or suppressing gene in a cancer cell comprising determining a change in expression of a gene sequence selected from the group consisting of the sequences of SEQ ID NO: 1-1067.

23. The process of claim 22 wherein said change in expression is determined by determining a change in gene copy number.

24. The process of claim 23 wherein said change in copy number is an increase in copy number.

25. The process of claim 23 wherein said change in copy number is a decrease in copy number.

26. The process of 23 wherein said change in gene copy number is determined by determining a change in expression of messenger RNA encoded by said gene sequence.

28. The process of claim 23 wherein said gene is a cancer initiating gene.

29. The process of claim 23 wherein said gene is a cancer facilitating gene.

30. The process of claim 23 wherein said gene is a cancer suppressing gene.

31. A process for diagnosing a cancerous cell comprising determining a cancer initiating, facilitating or suppressing gene according to claim 23.

32. A process for treating cancer comprising inserting into a cancerous cell a gene construct comprising an anti-cancer gene operably linked to a promoter or enhancer element such that expression of said anti-cancer gene causes suppression of said cancer and wherein said promoter or enhancer element is a promoter or enhancer element modulating a gene sequence selected from the group consisting of the sequences of SEQ ID NO: 1-1067.

33. The process of claim 32 wherein said anti-cancer gene is a cancer suppressor gene.

34. The process of claim 32 wherein said anti-cancer gene encodes a polypeptide having anticancer activity.

35. The process of claim 34 wherein said polypeptide has apoptotic activity.

36. The process of claim 32 wherein said inserting into a cancerous cell is accomplished in vivo.

37. The process of claim 32 wherein said inserting into a cancerous cell further comprises use of a viral or plasmid agent and is accomplished either in vitro or in vivo.

38. The process of claim 32 wherein said cancer is colon cancer.

39. The process of claim 38 wherein said cancer is adenocarcinoma.

40. A process for determining functionally related genes comprising contacting one or more gene sequences selected from the group consisting of the sequences of SEQ ID NO: 1-1067 with an agent that modulates expression of more than one gene in such group and thereby determining a subset of genes of said group.

41. The process of claim 40 wherein said functionally related genes are genes modulating the same metabolic pathway.

42. The process of claim 40 wherein said genes are genes encoding functionally related polypeptides.

43. The process of claim 40 wherein said all of genes are genes whose expression is modulated by the same transcription activator or enhancer sequence.

44. A method for producing a product comprising identifying an agent according to the process of claim 1 wherein said product is the data collected with respect to said agent as a result of said process and wherein said data is sufficient to convey the chemical structure and/or properties of said agent.

45. A process for screening for an anti-neoplastic agent comprising the steps of:
(a) exposing cells to a chemical agent to be tested for antineoplastic activity, and
(b) determining a change in expression of at least one gene of a signature gene set, or a sequence that is at least 95% identical thereto,
wherein a change in expression is indicative of anti-neoplastic activity.

46. The process of claim 45 wherein said change in expression is an increase in expression.

47. The process of claim 45 wherein said change in expression is a decrease in expression.

48. The process of claim 45 wherein said change in expression is a change in expression of at least 5 genes of said signature gene set.

49. The process of claim 45 wherein said change in expression is a change in expression of at least 10 genes of said signature gene set.

50. The process of claim 45 wherein said change in expression is a change in expression of at least half of the genes of said signature gene set.
